United States Patent Application Publication US 2007/0054278 A1 - sequence listing, part 62

SEQ ID NO: 95433 - DNA, 85406 bp, Homo sapiens
ctgattttttcttaattacaaaaactagagaattccaaggggaaaatgttgggagctatgtgtcctttttctaattgttcagtaactaagtctgctaaagcctccagtttctctttactcagtggccattgttctatccaaattggcttatctgttaaccattttaaaggtataggttctggaggcttaacaatggctgccatcaaaaatgatacactaaaccttggcgggaactttgtctttccatttgaagcagttccttcaaaccttgcaaatttttttctagtcccataccaaggacataccccatttcatgcatcatatgttgactttgagggctatataattgctctggaattagaacttgtgctccccattgttgtaatctcttccccataaatttttaggtacagaagttacaattgattgaatagtcccaggttgtccatcgggcccttcataatgcaaaatataactactttgatatacttcagaggctttaccacctccaactatgttaaattgagcgggttgaattggccatgcagatggccagtgccatagagaaatgattgaaatgtctgctcctgtatctatcaaacctttaaatttctttccctgagtagttatttcacaggtaggacattcatcagtaatttgattcacccaaaaagctgctttgccttgtttatttgtgcttccaaatcctcccgttcgtttaatttcacttttccccatttccacatacggcacaatcaggagctgtgctatgctctctcctggctctgctttccagggaacagaagtggatataacaatctgaatttccccattgctatctgaatcaatgactcccatatgtacttgctgtccttttaaatttaaactagatctacctagaagtaatcctatcctccctgctggcaagggtccacagacccctgttggaactttttgcaggggttccccaggcagactcacagcttttgtgcagcacaaatctactgcggcactaccagctgtggcgggggacagacattgtacaggggtgaaggagtggcctgagccagaactgccccaggttggaacacggcccgggacaggcccctcatggcgtttcctaaattgggttcccatctttatcaaacttagagtgacattgattagcccaatgttttccttttttacacttcgggcatagacctggctcatattgattaatagcttgtttaaattctttgagtaatttaaaaggaaaaggctcaaatatagctataatatttccctattgatctagggggtgtatcctaacagggaactgccaagcctctatatcaccctctcatctagcttgctgaattcctgcctgaatagaactgagagcggttgctcaaggaactgctttaacagtcactggggcaactacttttcacccagtgtcctctagaaaagaaagatctggagggtcaggccactctttttcttcaaaataatgagggggtgcagaagggtagggatgaacctcttcctcctttgccactttagctttagctggcaaacaaacctgctgttacctcttctgttacttcgttatactttccttccttatcattagtgtgaaaaggttccaaggtggaacaaaccagagcccacacttgtcccactgttaccctgatgcttctgtgttccctttctgactcaccatgggcattgcttaagagtactcgggtgtcctccagcttaattccacattctccaaccgtcgctctggcgaccctttgacctgggatagagccccatgtatgggcaccacttaccgagaccagctcggtcgtggagaccctaacccagcagcgctagaggaattaaagacacacacacataaacatagagtgagaagtgggaaatcagggggctgacagccttcagagctgagagccccgaacagagtttgacccatgtatttattgacagcaagccagtgataagcattgtttctacagattgtagattaactaaaagtattccttatgggaaacaaagggatgggccggaaataaaggatgggctctggctagttatctgcagcaggaacatgtccttaaggcacagatcactcatgccattgtttgtggcttaggaacgcctttaagtggttttccgccctgggtgggccaggttttcctcgcctttattccggtaaacccacaaccttcagtgtgggcgtcatggccatcatgagcatgtcacagtgctgcagagattttgtttatggccagttttggggccagtttatggccagatttgggggcctgttcccaacacgtctcaaacaacaacaacgaaaaccttatgaagcactaccttatgccaggcactttactacacactggtgctataaatagtgagcaggtaaacctctgtctcaaactctaccaaactggaatttcttccaggtggagtaaaccagttctccttaacaaacctgtgagctatccaggtagtactgtgtttgtttcttttaccatcttaacggtttctaagtgtatagttcagtaaagtcaagtatattcacaccgttacrcaacacatctccagaactttttcatcttgcaaaactgagactcggtacccattaagtaataactaattgcccctccccccaggccccataatcaccatccttctttctgtttctatgaattttttttttttttttgagatggagttttgctctgtcacccaggctggagtgcaatggcatgatctcagcttactgcaaccttggcctcccgggttcaagcaattctcctgcctcagcctcctgagtggctgggactacaggcgcccatcaccacacctggctaatttttatatttttactagagataggcttttgccattttggccaggctggcctcaaactactgacctcaggtgatccacccgccttggcctcccaaagtgctgggattacaggtgtcaaccactgtgcccggcctgtttctatgaatttgatgagataccttatataaatggaatcacgtacattagtatttgtcttttggtgactggcttatttcactttagcataatgttctcaagttcatccatgttgtagcatgtgtcagaatttccttccttttaaagctggataatattccatagtatgtatgtcccacaattttttttttttgagacagagtctcgttctgtcaccaggttggagtgcagtggcacaatctcagctcactgcaatctctgcctcccaggttcaagcaattcccctgcctcaacctcctaagtagctgggactacaggcacgcaccaccatgcccagctaattttttgtatttttttagtagagatggggtctcaccatgttggctaggatggtctcaatctgctgacccgtgatctgcccgcctcggcctcccaaagtgttgggattacaggtgtgagccaccgcacccagtcgtatgtcccacattttatccattcatacagtgagggacatttgtgttatttctaccttttgattattgtaaatagtactactgtgaacacagatatacaaatatctctctgagatcctgctttcaatacttttcaaaagttatttgctggaaggaaataacactttcatgtgcttctaagtttggctctttatatgtgttaccttgatcattctctcaagcagcactgcccttaatcccaagcaactggagctcttgggcggggtgggggccttattggtcttcctctgcccagagtccagaggatgtgcccacccaccttcctttagatcatgctctaggtacctacttaaccatcctcaaatttgcttccagggcccagataggccttttcctaggtccacccttcctagagtggacctgctagtatgtacagccctagacccaaagggtggctacagggcagctttgtgggggactcatggtgtggatcttcaggctgggtgtccacatgcaggcataggaagcctgagacctcacactgtaggactgagttgggaatggtaaggggcttccatttgtactttttctctggactcctgtaaatattagtagctataatgttgttaagataaacaagtactattgacaaggtctgaagaacatttagttccattactgtaaacctgtttttaactggatgtattttctagaatcagtgtatcactagcttctcagtgtatagtgtctagtcagtgaaccagacggataagatttgctccttagttaaggaagcctgcaccagggtgaaaaaccgttgttgttaatctgaatgaatctgttcttctcttcttttgcatatgtaacacttattaatgcaaatggaaaacacagatgatgcattcgtgcaacaagaggagacaagaaccctgaggcatcaatgccagtgggtagacacacaggcaattcagtaagtacgtctgggatgcgccagtggaggctcggagaggctaatgagcttgttctagctacccagacccacagattcatggctgaatcccagaagcagcctgggagattttgtggggagatgaggcaaagtcatctacttccttggcaaggtaaagrattcctttcaggaatcatcttctacctcaagctgccgtgttttagttaaacatcacagctcagtattgggacagaaatgtagaaggaaaaaaatgctgaagggtcacaagcaaggagcaggtctagacagctgagaggaaccattctcctccaatagctctgtttcttcaataactggccatgtagacccgttctacccccgagggctgggagtcgagtcaggttccagactgaaatgctccctgatcttagcattccttcacttgccatcccacaggcacctcaaatttggtgcgtccaactctgaagggctcatcatcaccccatcatccttttcctgtgctccctgtgttagtcaactgcaggattaactccccgccccccaaccccagtcgctcaagcctgaacattcctcaacaacgcccacaccccctcaaatccggatatttgggcttcctaaatctctacctcctaatctctttcacatgcggtccactcctttctgtccccattgccaaggttgggccaccaccacctatctttgggacaacttacagtcttctaaggggggtcctgccttcggtccgccccacctggctcatctcttttcaacagtttctgcggtcctcacctgcccgagacagcagtctacaatgcgaacacagtcatgtccttccccttcagcggttccccactgcccccaatatgaaaaggagttagaaacccctgccttcccactcccaccgagcaccttcgccttctgaactggccaggggctctgttgcttgctcgttgctctcagaccctttgcgcaaggtgctccctcaacccaaaatagaatctcggcccaccctctgtcggtcttcgccccactgtcagttgttcatttaacaaatattcgctgcttttgccaggctatgcaataaacgctggggttacgcaaggggagcgcaaaacaaaacaaaacagagaacaaacaaaaaccacaactcccaaaagtccattaagacccctagccacagggggcttacatctgaggggttaccgtcccttggcacaaggtggagtatgaaatccgcctctgccttccaggcttttccagtgccaagacctgcggggccaccaattgtgagtcccctcccgcactgactactccctcaacaggacaggagggaagctgaacctgtcgggacaccgcgctgggcacgctcaggtcccaccgcgcgtgctcatcggcggtccctagcgcgagttcggacaggcagcgcccccctccgactgtgagctgggacgctcccgcacgcttcccggcaccccttcagtcttcatggtacaccccgcccgcaggtacccggacggcggaagtgagccgcgggggcggatcttgttgttacgggtaacggaagtgtggcggcgttgggttgagcgggctttttggaagtttgtggcggaggtgaggccgaggtgactgcagagcggctcgcgaggtgctcgggctgtgggactgggcccctgggagggagcggttctgtrggggaaaggaggctcctgtcctgacttggcgttctggtattttctctggcgtggaaagtaggcgcgctccgctgtctcccgccgcctgcctcagctttcgcggttccctcctaggggtgtgcctcagtcggagccccttctgttaaattcttcccccttggcsgasggtgagctcttacttctgagaaatttcccttaaccttgctttgcatttgttgtccggtcgcggtctccatcaccagctgcttcgtgttatagtttttgtatttgcgctcacggcttgttaactgaagaacccggaagggaaggccgcggcgtttcccgccggcggggctctgccattctcggatcttggcttcagatctctgatgctccccagcgtctcttggcaaggaatctacttcgcgttcagggaattcacagccacccgcctctggtcttacctctggttttaggatgattttagcaaatgtgcctaggttgatttaaacgtatccccctccgaagccgcctgccccttctggctggacacctttttaggttggtgtgtcctgtttgcatccggtagttcaaagcatgggatcttggagtccggagctggacagactcgggtttcacttctctctctgccacttggtagccttctaatcttgggggaaattccctaatctctgaatcccaaaagttgttcatctaaaatggggctaatattacacctacctagtaggtggtgttgtgggagtcatgttaatgaatgtaaagtgctgggttcagtgttttccctattataggggttcaataatttgttcaacaaacatttgttacctagtttgagctaggtactgtgctaagtgctggagatacaatgataaacaaaaccagctacggcccgtgtccttaggggacttatagtctagtgggagataacatttgttaatctgataattacacatgtaatattaaaaattggtgacagtatgtaagagagtttactggtgccatgagaggatgtactaggggaacgtttaacaacctatactgagcttttcttttcttttcttttcttttttttttgagacagagtctccctctgttgccaggctggagtgcagtggcgcgatctcggctcactgcaacctccgcctcctgagttcaagtgattctcctgcctcagcctcacaagtagctgggactacaggtgcgtgccgtcacgcccagctattttttttttttttttttttttttttttttttttgtatttttagtagagacggggtttcaccatcttggccaggaaggtctggatgtcttgacctagtgatccgcccgccttggcctcccaaagtgctgagattacaggcgtgagctactgcgcctggcctaractgagcttttgaggagatgtggattgagctaagatctgaaggatttgtaggaattagtaataaaagattggggggcagtggatggaagcaggaatatttatttaagttccagatggaaacatgtggaagggcctgtggcagaaagaacttggagatttgaaggactggaagcaattctgcatggctggagcagagtgatgaaagggaggtaggcatgggtcagaacttgcaggacttattttatccttacttaagggttttggactgataaagcaatggaagccactgaagagctttaagatgaggatggcatggagggaagataagtcacataatcaggtttgtgtttcaaaaacatcactttagttgctgcgtagaagggaacaagttaggaaacgattgcagtagttcaggtgagagatggtggtggcttggggtaatgtgtcagtagtggagatggagaaaagtagacagatttgggagatatttagtaggtaacattgacaggacttggtaatggatgtggtgaaggatgaaggcaaagttgttaagaatgttacctaggtttctggtctgagcagctgagtggatgatggtaccatttatggagacgggaaacacaggaggaagaagaggaggaacagattttctttctactaggctgtacttcccccttctattttcatagctactcactgaattctatctgcttcatgtgcctccatttcatcccatcttttctgttctccagtcaccaccctagtacaggtctttatcatttccactaaaataacttccaaatggtctcttagcatttgctgtttcttcttaccttctccccactttaatctgcacaaagatgctaggttctgtttcctcaaacacttgcaatcttgtgagattgtcttttgctcaaattttttaatggttctcagtaatttacgaaatagaatctaaattccttaacctgtttacttccagcctatctttccagacttcctactcactattttcctacttggattctacctcagccattttactcattttcccccaaagaaatttctcatttcccgtatgaatgcctttgttcatgatacccttctccataatgtatacaacctggttgtctggactacctatatttaatctctaagttccagttcaagctttcctctgctgcgaaaccttgacatttaagaacacagttacatcttttaccttgttaacttctcagcttttctttctttctttcttcctttctttttttttttttttttttttttgagacagagcctcgctctgtcgcccaggctggagtgcagtggcgtgatctccgctcactgcaagctcctcctcccgggttcacgccattctcctgcctcagcctcccgagtagctgggactataggcgcccgccaccacgcccagctaatttttttttgtatttttggtagagacgggggtttcaccgtgttagccaaaatggtctcgatctcctgacttcgtgatctgccctcctcagcctcccaaagtgctgggattacaggcatgagccacggtgccggcctctttttttttttttttttaagagacagggtcttaccttgttgcctaggctggagtactgtggcatgatcatagctcactgcagcctcacactcttgggctccccttctcacttgtttttataccatttaattggcacatagcatttatagtgctattggtttattcatttatttgtcaaatactttattacatgcttatggtaatatataatgtattacatacttgatatgctgttaaatggaagctttgttctaggtagtatggtgagtagatggtaacaagtgtgggcaaaaattatgaaaccacttgattagaatacagattcctaataaggcaattccagggaattttcaggattattttggttaggttaagaatcatcttgccactgagcttaagaagaagaagaaraaagaatcagctacttaaagatagtcctaagtttgttgagcacccattgcataataggtatgaaatattcagttaacagggaaggaaaacaaatcaagtttgtttatttctggaatcttcacccacctctgacgttttycccttgtagttctgtgatatgagcaacaatggaccagaagattttatctctagcagcagaaaaaacagcagacaaactgcaagaatttcttcaaaccctgagagaaggtgatgtgagtattaggaagcatgttctgctaaaagtaaatgtcaggcatgatgacacattcaaaggacatgtgagaaagaaaaattacgctgcttcttcatctactccccattcactrtaggagacaaggatttrtttaataataatttatagrtgtaaagaaattggggtgagggaatgagagaaatagactacttgagggcatttgtgaccaagtttaaacctgaaatagtttaagaatagaatgcttttacaactgtatttataaaagcaattagtatacttttatggtcctcagaacaatcctatttgatgataatatccagactatagttactgattgagacattagttttgcattttgatgcttctctgtatttttccgtaaagaaattaagtttataagcggcaaaatattttgaaattattagtaaaaattagggcctctgttttcactataagtgtaggattataaaatgggatagtaattgccttatatgttaggctgtttcttctccctaatgttctttctcagctgatatactgctcctttttccrtaagtgatctcatcctatccaggtccctgcctggaaaagaatccctcttcaaggtatatgtacaaacaagtaaagacattgagtatcatgggatttttttcctttttctgtcaattgatgagtattatgtttttaagggaatttctttgtgttaatgttgtagttattgaaggaaggtgcatcttagtgtgtgttatctgacatactaactaggaattgatgcagtgttgctctttgatttttttttctttgaaattatccaagattgcctttatagctattttttgagatgacttgttgcatgagttgtaacttgaatcattctatagacaagatttgattgaaactagcatttaaattatttatttaaagtttcatgcctcaaattgaaggcgtgaacactgtcaaattgaagacagtgttccagatgttttctgactctaggatagagtaatgctaatatttccctcatttttccattaatgcaaaatcagctttttggcagcaacattatattgtagtctcattgctcttatatttatttttgtatatgttgataagttgctaagtttcctttatctctgaagtccttttagaatccatgttaaaaactatatataggccaggcatggtgacttacacctgtagtcccagcactttgggaggattcctttaggccaggagttcgagatcagcttaggcaacatagtgagacccagtttctaaaaacaactaccaaaacaacaaactttatatctgttaactgtcaccttttttagattcatcttgttttactccatcaagatcattttgtatgattctgctgaccgtattaatcagctttttatcctctacaaatttgttaagcatgtcagtaatatatgcaggcagttcatttgataaaatgtcccacagaagatgaactcagagtaaaaaattataaaacacataaagaagtcctgtggcaagaaagactcaaacagaaatgggaaaattcatattcaaggatttagagcaatctgaaaaaaatctttaattatttaacacaaatacttaatacagtatttaactttatttatttaaaggtgggatctcacccttgcacaggctggagtgcagtggggcgatctcggcacactgcagcctcaacctcctgggctcatgcgatcctcccacctcagcctcctgagtagctgggagtacaagcatgtgccaccatgtccgactaatttttgtatttttagcagagatggggtttcgccatgctttccaggctggtcttgaactcctgagctcaagcaatccacccacctcagcctcccacagtgccgggattacacgtgtgagccactctgcctgacctagtatttaaaatatttgaagatgtaaatgaaggaatagaactcacaaaataagggatggatttagaaaacaatgaaagacaacttcttgaaatgaaaacctcagtaggtggtttaacagtagacaaaacattgctaaagagaaaattagtaaagtggaatacagagctgaggataactaaataaagcacagattgtaaagaggtggaaaatataaagaatatttaaaatatatgcagagaactttgataagaatatattatcttcttaaacacatagaatgttcataaaaattaatcacatgtcatatactagagcacaaagaaaacatgggtaggtcccataaggtagaattattacaaactattctctgtgatcacaatgcaataaaactggaaatgaaaaccgaaactaaaagtcaaaaagcaaagacacttttacttggaaattaaaataccttctattcaaccattgtggaagacagtgtggcgatttctcagggatctagaactagaaataccatttgacccagtgatcccattactgggtatatacccaaaggactgtaaatcatgctgctataaagacacattcacacgtatgtttattgcggcactattcacaatagcaaagacttggaaccaacccaagtgtccaacaatgatagactggattaagaaaatgtggcacatctacaccatggaatactatgcagccataaaaaatgatgagttcatgtcctttgtagggacatggatgaagctggaagccatcattctcagcaaactatcgcaaggacaaaaaaaccaaaccccacatgttctcactcataggtgggaattgaacagtgagaacacttggacacgggaatgggaacatcacacaccggggcctgttgtggagtgaggggaggggggagggatagcattaggagatacacctaatgtaaatgacgagttaatgggtgcagcacaccaacatggcacatgtacgcatatgtaacaaacctgcatgttgtgcacatgtaccctagaacttaaagtataataaaaatatatatatatataaaaataaaaaaataccttctaaataactcttggaggaaaagagatacaaacaaattacaggatttttgaagaataattacagataacaaaaatactacatgttaaaaatccatggaataatgttaaaaacaagtgtttaacaaatgaaataatgaaatcaatacaaatgaaataatgaaaataaataaattcccaactcaaaaacctagaaaaaagagaaagtaaacaacaacaaaaaaacacaagaaactactaaagataaaagtggaaattaataaagtagagaacagaaaaatagtggatcaaattaatcaaaatcttggttctttgtgggggaaaaaaacaccattaattaatataataatcaaaacagtggagtaaaaacatgcacaaaatgagaaatgacaagggagaaatactgttaatacagagaaaatctcaaaaaatactgtgagactacagtagattcctgtgcaaataaatttgaaaacctagaggaaatggataatttcttaggcacgtacagtttaataaaattgagccaatttgagatggaaagcttaagcagaccagtttccatagaagaaaagagaaagttatgaaggaactacttcgtacaaaaacaccaggcccagatagattggcaggaaacttctgtcaaacctttagagatcaggtagatagtcctaatgctacataaattgttttagagcataaataataaaggaaaacttccaagttctttgaatgaagcaagtataacattgaattaaacaaatataacattgatttttttatgctatctttatcaggtataaccttaaacctcataaagatagcatagaaaaaagaggatatagactaatgtaacttacgaatattgatataaaagtcttaaatattaggggacagattgcaacaccacatttaaaaaaagtacaccatgatcaagtgggatttaatagcaggaatacaaggttggttcagtatttgaaagtatattactataaagattatacgattatcttyatggatcagagaaagcctttgacaaaattcaacactcattcctaataaaarcttgagaaaaatcagaatgggtggctgtttcctttacatcataaaatgtatatatctaaattctagagtcagcatcttagtgggaaaccatagagacatttcctctaaggccgggaacaaagcaatgatgcctactgtctccattactatataatgttctgattggctagcctatgcatttaacctagagaaaacaatcacaggcataataatggaaaaataaaggctgagtgcagtggctcacacccataatcccaacgctttgggaggccaaggtgggcagatcacttgaggtcaggagttcgaaaccagcctggccaacatggtgaaaccccttctctactaaaaatataaaaattagctgggcgtggtggtgtgtgcctgtaatcccagctactcgggaggctgaggcagaagaatcacttgaacctgggaggtggaggttgcagtgagcccagattgcaccattgcacttcaacctgggtaaacaaagtgagattccatctaaaaaaaaaaaaaagaaaatataaaacgtctctctttgtagatggcatgatagtatacctggaaaaccctggagaatctgtgataaaaccatctataaacgaattcatcaaggtagcagaatataaaattaatatgcaaaaatcagtagcattcatacataatagccagttagctcacgcctgtaatcccagcactttgggaggccaaggcaggcggatcacctgaggtgaggagttctaaactagcctggccaacatggtgaaacctcaactctactaaaaatagaaaaattagctgggcgtggtggtgcacgcctgtagtctcagctactcaggaggctgaggcaggagaattgcttgaacccgggaggtggaagttgcagtgagctgagatcacgccactgtactccagcctgggccccatttacaatagcaacagaaaagttaaaacaggaataaacctgagaaatgtccaaaacccatgcgaaaaaaaactatgaaacacttctgaaggacaaagtagaaaactaagaagatatcccctgttcttgattggggagtctcaacatcacgaaaatgtcaattcttccaaagttaatttatcaatttaataccagtaaaaatcccattgagctatatatataagttgactgcaaaattcatatagcaaattgtacacacagggatagttagggaaaagctgaaaagagctctgagagaggattaaccatagcagagactaaacaccacaaaaacttttataaataagagtgcagtactggtacatgagtagataaacagaaacggaataggatacaaagaatagaataggtaatgcataagaatggaaagtctcaaaatagacccaactacaagtaaaatctagtatataataaaattacatcttaaaacactgaaataaagataatctttgacaaatgatattggaacaactggatggacatttggaaaaaatagatgaaattagatgtgtttctcatattcaagagaaagctccaaatgaatcagaaatttaaatgtaaaaaacaaatctaaataaatgttagggctgggcacaggggcttatccctgtaatcccagcactttgggaggctgaggtgggaagatcgcttgagccacgaggttcagattacagtgagctatgattgtgccactgcacttcaacgggtgaaagtgagactctgtctcttaaaaataaataaataaataaataaataaataaahaagtatatgttagaagaaaacatggatgaatttctctttaagctcagtgcagtgaaaagctttctaactgtcatacaaagtatagatgcaagaaaagataagtttgtctacatataagttaaaaagtttgtgtggccagaaataccataagcagagtcaaaagacaaatggcaaactgggaaaaaatatttgtaacgtatcacagaaaaaggattaatatccctaattcataaataacttgtgggggtgggggggaagataaactgtattttaaaaaggcaaaaaacatgagaataatcactaaaagatatataaaaatggccttaaacataagaaaatatgctcaacttcactcataataagagaaaaataaattaaaataaaagatagtgatccacctgccttggcctcacaaagtgctgggattacaggcaggagccaccatgcctggccccatgtatatttttatgtgtataaacatgcatacatttcctggctctctccaatgaaagaaccatgaagcaaagatgccatagttgctcggtgcggtggctcacgcctgtaatcccaacactttgggaaactgcgtgggtggatcacttgagtccgggagttcaagaccagtttgggcaacgtggtcaaatcctgtctctataaaaaaataaataaataaattttaaaaagatgccttagtaacaacaaacacacccatcacctagatctttgctgtttcataaccattcctcactcaagggaaccagggctcttcagagaaacggataagtttatgcgtgggcaggatggatacaagatgaacctggaacatcttgctataccagaaagtaaagaagtgctcaaaaaagacagtgggggcgtgtcacaaagacagaagagccagcttgaagggtttccctttggccaaatctgggactatttgagcatcaaaataagttcaataatgaaccattgaaaaatacagagatttataagtccatactcataattaataaataaattactttgggagttcgaggacggaggatcacttgagtccaggagtttgagaccagcttggacaacatagtgagaacccacctctacaaaaaaataatttaaaaaattagcatggcatatcagcacacgcttgtattcctagctaactggagggttgctgaggcaggagaattgcttgagcccaggagtttcaagttatagtgagctatgactgtgccactgcagtccagccagggtgacaaagaagactctgtctctaaggtaagtaaagtaagtaaatgaatacatgggtagaaaggagttctcttgcttacagtgcaggagttggaaaatcattcctttgcaattgtaatggtaaagattgaaccagacaagaaataccaatggatgttaaatccagggggactttaaaaacattgatacgatacaattaatgaagctaagaaccttattccaactctccccagtaattatttcactaatgttctctttatgttccaggatcccactcagcatcctacattgctcttagttgtcatttccccctgatttcctacactctgcaatagttctcagtctttccttatctctgttgatcatgatagccctgaggagtattgattagttgttttgctgaatgtgtctcatttagggcctgtttggtggtgtctcatgattggaccaatgtcttgtatccctggcataaggaccacagaaatggtaccatgccctttttagtgtatcaaatcactgagctcttgatgtcagtgttattcctggtgatactgactttgataacctggtaacagtggtttctgctgggcttttccattttacaggaagaaaattagatgaggagcaagatatttgcatgatcttaaagtgtctccctataaattgcttactggtggcaaagggacagggtgggggaagtaattataaagtgggatcagaatatcaccaatgagggacagatggacatcatgtgcttcctgatgtgatactccgagaatgacatgatatcacctgtgttcttgtgagaccgcataaactcaatctagccacaaggaaacatcagacaacacaaaatgaggaatgttctattttttaaaaactaaaatttatttggattatgctgttaacttggtagttacagtctgccaattaattttaaagccttctgaggtaacagggatacttaaatcttacttgctctatttctgagttttaaaatgtagtaaaaagcataactgaacatggtcaaaagaaagactgaagatcacataagtggaaggaggaagaaggggagtagaggacagagtcaatagaagaaaattaacattcgttgagtacttgtcgtgtgttaggctctgtgcaaattcttctcccctttatctcagtcctttgaggtggggaaatggacacacataacagattaagttgcctgaggttttatagctagtaaatggcatagctaggatttacatccagggcttctgattctggatccagctttttttccctcttcctatgccacactgctttctgttgaaactgaactatttcaaaaagagtcaacagcttctcagccttggcagtgctcacgttttggctcggataaatctttgttgtggtgggctgtccagtgcattgcagaatgtttgatagcatctcttacctctacccactagattccaacagcatccttccagttgtgacaaccagaaatgtttctagacattgtctagtgtcccctgggggacaaaaatcactggttgagaactgctgctctaagggttatgtcaaggaccaagtactctgttggaaggtataggcaagagtagtcagatacttctttattatatatttaatagagagatggactccagctagaaacaccagcctcatgtacttgtggaagagagagtttattgttttattagtcttggcttctgtgacacctctctctcgagattatcctccaatgttattgacttcactttctccattgtctttgctggcagctgcttctctttttaatgactgactcttggtgtttctcttctttatattctttcctggatggtctcatctgtttccattgatgctccacttggcatatttcattgtcatctatttggcacttccacttggatatctcagagtagtggttctgagcctcacagcagacccgaatcataaactgtgggtagatcctggaaatttagtaagctctcagggtgatttagatgcttccttaatcccaaattttcagcacgtaaacagatggtgccactatccaccagctagctgcttaagccagaaatttaggaatcctccttgatttctttcttttttgttgtttttttttgatatggagtctcgctctgtcacccaggctagagtgcaggggcgtgagctcggctcactgcaagctccgcttcccgggttcatgccattctcctgcctcagcctcccaagtagctgggactacaggtgcccgccaccacgcccggctaattttttgtatttttagtagagacggggtttcaccgtgttagccaggatggtcttgatctcctgaccttgtgatctgcccrcctcggcctcccaaagtgctgggattacaggcatgagccaccacgcttggccagatttcttttccttcatcaccaccccctacttcccttccaaactaaggaatttctattcttagttctcaaatatttatcttagatctatctacttttcttcatcgcctgtattagtgtgctagggctgctgttacaatgtatcacaaattgggtagcttaaatagcagcaatgtaatgtttcacagttctggagactagaagtgcaagatcaagtgttgtcagggttggttccttttgagggctatgagaatttgttctgtgtctctcacctagcttctggtggtttgttggcaacctttagcattccttggcttgtatcacctgatatctgctttcatcttcacctgacattccccctgtttgtgtttctgtgtccagagttcccctttttataagggcattagtctttggattaggacccatcctaatgacctcaactaatctcacctacaagaagagcccaatttccaaataaggtcacattctgaaatactgggggttagagcttcaacatatgaaatttggggttgtggggaggacacaattcaattcataatgcctctattactttggtctaggccactgtcatctctctcttaaacatggtagcagtctactaacaggtatccccatttcactcttaaacccccataactcattctccacacaaggagcaaggatgatttttgaaaaatctatcatcccatttccttcttttctctttagtaacttccgttgcacttagagaaaagctaaacttcctaccatggcctgtaagattcttcataatctggtcctttcccgtttctcttcaaactcatcttctactactcttttctttattattctccagccatgttgatttttttttttttaagcaaggctttggcctcaaatatgccaagttctttgctgcttcttggacattgcacgtgatcatacttccatctggratatccttctctaacgcctttgaataattagctccttcttgtccgccaggtctctacttaaatgtcacctacttctgagaagcttccccttactaccctagaggaaatttccttcctttcctcacttattgtctatctcagcctcttatttggttcttttacaatttttttctgccatcctttcccctcctgctctgttatgaactctgagtcaaattactatgtctgttttgttcatctttataacatgcctaaggaaaataacatgctcaaaaagtatttgttsgatgaatgtatgttcccaacttagtgctaagttataaacataaatgtttatagaatgagtaagaatagattttagtcttgacaatccaggatcatattaagatataccctcctctgtctaaaaattatggtgtttgtaatacttggcgtctctgaatgatctgaacgtgacagaagagtactttttcatattgagtgtttaggtcattggggtaraagactgttgccagagacttgtacctttttctttctttgcagttgactaatctccttcagaatcaagcagtgaaaggaaaagttgctggagcactcctgagagccatcttcaaaggtaataataattaatgtcacttctgtctgtctcctgcattcattggtagatttgtttagttttcgtacttttcttacggtttgaagccccactggaacattttccatgttttgaggattctacagaatcaactacagcagcagtttcctgtctagtggacttaagtaattttactgaagggagtttgaagtggctacctgagattgcgttgctgatttgggggcctataattacagaatgtgcttttcgtaaaatctgctttggtttacttgtgcttttaagattgtggagaagagaacagcaatgtttaatacataatccatgcttagcaaggggcaagtwacctctggggtttaatgaaatggggtatcttaaggtgccttatatagagattcttcatgcccgctgagacgtatttgttttcttgtcttgaacaagggctagtttaaattgttgcakattgtgatttatagtggttttataaattctggtaggataaaattttacaaggcaaaaattaaaagtgtctttggactcttaattaggtatgttaacttggtttatttttcttcccccaaktaaattagatctctgctgcaagggtacaaaaacacatcttcctattcatgaaagaactttcaagattggttgagtcaacctgtatggaaacttgctaaatattttatagaaatatcagagaaaaggaaataattaaagatcaatagcaactgcctacgtacactactactaaatggaagagcaattctatggcttttagtatattcagagttgtgtatccattaccacaattgattttaaaacaatttccttacccctgaaagaaggtttgcatctcttagatgtcacctctccaaacccctagtccattccagtcctaagaaaccacgaatctactttttgtctctacagatttgtctattctggacatttcatttagtggaatcattctatatatggtcctttgtgactgacttctttcgtttataatgttacaaaggttcctctatgttgtaatatgtatcagtactttatttttactgctgaataatattccattatgtggatatacaacatttttccattcatgagttgatgaagacttaagttgtatctattttctggccattataatactactatgaacatttgtgtataaatttttgtgcggacatgttttcctttctcttggatatatatctaggagtggaattgccggatcatgtggaaactcttatgtttaactgagaaaccgccaaactgttttccaatgtggctggattaggatgccaattttttcacatcctcatcaacacttgttattatctttttttttcagttttgatttattttcatcactttttctacatgatccagatattttaaaatgcaaagaaaattaactttaatgatatgttccaggatcggcactaaaaaaaaattttcagactgcaaatgaattatacaaatgaaaatatcaaatggagatccccttatccaaatgaaagcactcamcttattaaaagttcacaagtatttgtatagagcacattaaaaaagtcagcttgctaaatgttttgattttaaagaacgattgcagaagtctgaagaaaatagattagttattaaatttgggttactggacttctcaaaagctgtaagacctattagaaggttacttcatcctgtaattattaaaataataggtagatgaagaaaagatgacattttagtccctttattttggctaaattaagcactttttcaaagcccttaaccattgctgttctaagcaccrtagtaatcagtcgtttgataattctgtttttttgtatttaactacaaacctgttcgtttttcctatttacctgtcaatgttgtaagacttgtttctgaaccccctgtttaaaacaataaggttccccctgctctgaggaagctggaacacttaggagacgtaagatatacacttgttgtatccagttggtggaatcgggggatttgcagaaagaaatagygtctgagatcataggattactgatgctggaggtaagatggcaaacaaaaacttttatttgggggtagrtttttgagggtttgtaatttgttgagggaaggaaaacttaagtgcccaacctagcatagtccttatttatgagtaagacctgttgttaaaaaacaaagaagcaggccgggcatggtgactcacacctgtaatcccagcactttgggaggctgaggtgaggatcgcttgagctcaggagtttgagaccaccctctgcaacatggtgaaaccccatctctaccaaaaatacaaaagaaaaaaaattagccgggctcgtggcgcatgtcagtggtcacagctacttgggaggctgaggcaggaagatcgcctgagccagggaggcggaggttgcagtgagccgagattgcaccgctgcagtccagcctgggcagcagagtgagaccccgtctcaaaaaaaaagcagatgaatgggttataatccacttaggtgtatatattacatttctggtaccatggacatatatctctttgaagagctggcatatctgaaaacatcagggaaccgatacaggattctaacttttgaagcccttcacaattataactacgtaccagacagagcagaatgattccataaatcccttatgggaccagttctggatctcggtcaattcatttatttcagcaaaagactttatttcttagaaagatttatcaaacattggatttctgcttgagatttcctttatcctgtgaacttttaggctcaccattttccaggaccattattggttgaattagccaatgagtttattagtgctgtcagagaaggcagcctagtgaatggaaaatctttggagttactacctatcattctcactgccctggctacgaaaaaggaaaatctggcttatggaaaaggtaattttcttccgactttagtggctttttctctatgcacataatcaaattcattgctcagtatattttgcatttctaggtgtactgagtggggaagaatgtaagaaacagttgattaacaccctgtgttctggcaggtgagtcttgktaatatgtataactttcttaggaatacaagtggcggaaaaaaaaccactttatttcaggaatttatgtctggaggttttaagtccttcttttttgttgtttttaatataacactataaaactatttagtctgcaatgaattagtgagaaagaaatgatttactatattctgtcctctaagactgttcatatagttttatttgcttgactgtatcttcttacagcaatttagtgtgttaagatacacataattaaatgttaatttagtgtgtttaatgctccaatctaagcattattggagtctcaaggtcgtgaaggctgggaaagtcaccctgctgctgcatcttttctttttttcttttttcttttttttttgagggagtagaatatacaagtgatgtatcctttaaccagtaattgtatttctgggaatctacattaaagaatgactscaacatacaagaaaatcctcacatatgaacatgttcaacacagaaatttgtgaccagtatgagcatacagtaatagagacatgtaaactatgtaagttaaggtagagccactccatgacatttatacctattaaaagtgaaatgtatacatcaaagatgaaaaattctaaccatataattaacaaagagattactatgttatataatactgtgattgcgtgtaggtttgttaaaaagaacaagaagggaatacccaagattatctaaaccagagataattgcttttatggttccttacataagatcccttacataaatcattttaagcatgtatttgtcaattaatttgtttttaattacacaagagtttattcaatacatactgtaatataccttgcattttttatttaatacaactgtccatgtcagcatatacaactctacatcattctttttaatggtttgcagtaatctattatttggctaatctacaattgtcagattatttggttatttccagtttttgtgctattacaaagagtgttgcaatgaatgtcttttttaattttaaatagagatgggaatcttgctttattggccaggctggtctcttgaactcctggcctcaagggatcctcctactttggcctcccaaagtgttgggataataggcatgagccactgcacctggcctgaacatctttatatatctagatgaccttttataagcatgtacatggcatatatttcaaatagtaaattgggtagatctgtgattatgtgcatttttaaagttgataactactgccagcttgtcatacattccctaaaacggtatgtgaatagagtttgttttccacaatctcaccaacattgggtatcatcagaattttgattttgcgagtcgggtaggttaacaactgctatttcattgttttaaatggtatttatttgatcttgtttctcggtattgcaaaatcaaacttgaattggccctgtttttttgtcctcattaattttacaaagttatatctaaataagttgtaaagaaataaactttgtcattttcttctaccaggtgggatcagcaatatgtaatccaactcacctccatgttcaagtaagcatcatcttttccyttttctttgtrtatcctgctttgtgaacttacttgctagaaattaaactatagcaaacgtaaacatcactctctcctgattgtaagaatattagtagttatgttttctgttacagattcacagattccctcctcactcctgcctcctttttggctttacttacttatttaaaacataactttattttttttataagaatgactttgcttaggtaaggttattggttcccttaaaggttcttcattagagaaaaatcaaaagggacagttataataatctattatctctttaattctctgctcccaagtttcatttcttaaaataygtttaatggaattttaaccactgtaaagccctgaattgaatttctgaaaacaaggcagttagacactgtctatagcctttagaatctttgatccacagggatgtccctctgactgcagaagaggtggaatttgtggtggaaaaagcattgagcatgttctccaagatgaatcttcaagaaataccacctttggtctatcagcttctggttctctcctccaaggtacaaatggaaaattgtttctccttagttctggtggtatgaccagttatgaccattcaacttattcatacccttggtttatatagcagagcaaacatagccgaacatagatgctttcatttcacgtgagcaaacatagccgaacatagatgctttcatttcacatatagtggtttggtctggtaaaaggatcatacttctcatccaaggaaaacatgcattatctcttgtattgccacattttctttgcggaggtaaaagggataaagatctcagaaagggtagactataggccccataaattcttacagtaagaggtatttcaaatcttgtttcaacatgaaagtgttctatacattcttagtttgagtctaagtcatagattatttatttaaatttgtactggagaattctttaagytgaaaactactttgaattcaaattggttattttgctgttaattgggagaccttaccaattttgtattgttttcagggaagcagaaagagtgttttggaaggaatcatagccttcttcagtgcactagataagcagcacaatgaggaacagagtggtgacgagtgagtaatatagtgtagaaataaagatcatttttacaaattcatcttctcattgtgtattttagctatttcattttcttctctctcaccgcctaccttcacctcagcacaaaacttttctaatcttctcttagctactcagtaataaagagaataacatgatctcttcagctctttcattttcacctttccaggaaaataattgtcctataagctgcaagtttaaaacctatttattaggtgtcagctctctgccaggaactgtttagccttggggctaccgtgctgaaccagtcagacaatgtccctgctcttgtagaacttcaattttagtgagaagaggaaagaaaataaataacaagaaaaatgttatagtaaaagtgctatgcaggtaattcaaatggatgatctaccactgacagtatagctactttagattgggtcagggaaaacctctctcagatgtgctattttaactgaagcctgaatgataagatccawaatatatagatcagagaacattctcaggtagggaaataatacaaaggcagaagaacagtgtgacatgtctgagaaagaggattttgggttttttttgtttcattttgttttgtttttgagacagagtgtagctctgtggcccaggctggagtacattggcatgatctcagctcactgcatcttccacctcccaggttcaagtgattctcctgcctcagcctcctgagtatctggtactacaggtgcgcaccactacgcccagctaatttttgtatttttagcagagacagggtttgccatgttggccaggctggtctcaaactcctggcctgaagtgattcaccctcctcggtctctcaaagtgctgggattacagacatgagccactgtgcctggccaaggatttttgttttttctttctttctttttttttgagatggggtytcactctgttgcccagactggagtgcagtggtacgatctcggctcagtgcaacctccacctcctgggttcaagagattctcctccctcagcctcctgagtagctgagattgcaggcatgcgccaccacgcccagctaaytttttgtatttttagtagcgatggggtttcaccatgttggccaggctggtcttgaactgacctcaggtgatccacctgcctcggcctcccaamgtgctgggatcacaggcgtgagccaccgtgcctggccggattttttgttttttaagcaaacatttgtaggatgttcattctgtgccaggggctattctaagcactttaaacctcacaaccctattttacctctactttatggatatggaaatcgagagacaaagaatttagttagtttggcttgagcaatttattagaggtggtttcttatttcttttttttttttttttttaagagtgtcttgccctgttgtccaggttggagtacagtggcaccatcatagctcactacagcctccaattcctgggctcaagtgaccctccagcctctgcttcccaagtagctgggactataggcacgtgacaccaagcctggctactgttttttttttttttttttttgagatggagtctctgtcacccaggctggagtacagtggtgtgatctcggctcactgcaacctctgcttcccaagttcaagtgattctcttgcctcagcctcccaagtggctggcattacaggcacccaccactatgcctggctaattttttttttttttttttgagaggaagtctcactgtgttgcccaggctggagtacattggcatgatgtcaggtcactgcaaactctgcctcctgggttcaagcgatcctcctgcctcagcctccctagtagctggggttacaggtgcgtgccaccacgcccggctactttttgtatttttagtagagacgggctttcaccatattggccaggctggtctcgaactcctgacctcaagtgatccgcctaccttggcctcccaaagtgctgggattacaggcgtgagccactgcacctggcccaagcctggctaattttaaaaattttttctagagatggtctcactgtgttgcccaggctggtcttgaactcctagcttcaggcgatctcctgcctcagcctcccaaagtgctggaattacaggagcaagctgccacacccagcagagaaggtggtcttagatactaaattagaataagctgacagagaatcagattttggagaaaataattagctcacttttttttttttaattagctcacttttgaccacactaggtttgagatatatattagggtcccataaggagatattaagcaggtactctggagtagtagggagagggctgaactggggataagactggaagggactaaagccaagagactggatgggattatcaagggaaagcatgaagaaaaacctaagactgagttcagaggcattccaccatttcaaggtcaagcactttgggaggccgaggcaggcagattgcttgagctcaggagttcaagaccagcctggatgacatggtaaaaacctatctctacaaaaagtacaaaaatagccaggcgcagtggctcatgcctgtagtcccaactacttgggaggctgaggcaggagaatcacttgagctcaggaggcggaggttgcagtgagctgagattgcacctttgcattccatcctgggcaatgggagtgaatccttgtctcaaaaaaaaaaatttttttttttttttttgagaagaggccagtgatgatgccctggaagctaagagaagaaaatttttcaagaaagaagtagttaattgtgtcagatctgagatgttmattaagatgggactttattgtttttgacaacttggaggtcatttgtgacccttgaaaaaataatctaatgttattgtgggggtgagggtagaaagaggatagaagcctgattgaattggattgtactgggaagagattgtgagataaaaaaggagaaattatgactatacacatttattttacgaaatcttgtaaaaagaagcagagtctgggcacagtgaatcgtgcctgtgatcccaaygttttgggaggctgaggcatgagaatcacttgagcccaggagttcaaaaccagctgggcaatatagtgaaactccatctctaccaaaaaatagaaaaattagccgggcatagtggcacatgcctgtagtcccagctactcaggaggctgaggtgggaggatcgtttgagcctgggaggttgaggccacagtgagctatgatcatgccattgcacaccagcctgagtgacagagcgagaccctgtctcagataaatagatggatagatagatagacagacagacaggagcagaaaattgggcagtagaatttctagtaaacacctgccttcagtgattgtatgagtttagcttgagttggtctacttgctcatcgtagcacctgtccttgtctctcactcaaaaaccatagctcataccttttttttgttgttgttgagacagggtctctctgttgcctaggctgaagtgcaatggcacaatcttggctcacggcaacgtccaccttccgggctgaagcaatcctcccacctcagcctcccaagtagctgggactataggaatgccaccacaycgggctgatttttttgtatttttagtagaggctggtcttgaactcctgggatcaagtgatscgcccgccttggcctcccaaagtgctggcattacaggcatgagccactgcaccttatagctcataactttctgttgaatcttttaggctattggatgttgtcactgtgccatcaggtgaacttcgtcatgtggaaggcaccattattctacacattgtgtttgccatcaaattggactatgaactaggcagagaactcgtgaaacacttaaaggtagcatcaaacttgtaaggtgatctgggtctcttttgaatgaaagtgtttgaacttaagccactgttatgccagttaatgacaggaaataaatactgtaaaatgaccctgggtgtggaggatctctttttttttttttactttaaaagtggaaaatacatgatgttaccacactcccttttttttaatgtcctcactttagcagtataccacatccttaagcaagccagaaagttctatttaaaaaaaccctcaaaagttctaacgcaaaaaagtgggaaaaaaggtgagaactattcagcaggaaactcaaaatctaattctaagtagattatgtgtcactgtcttatgtgaccttcagctatggcctctgctttctcatttatgaactaggatgttgcatctagtagtatatcgtggagttgtgtgatgctaagtcattcatcatgaagtatttgtaaagcagtaaaataaaactcagaagtgttttaaactatattaaaagtagtgtacagatatatttgttcctccaactttttagtttgaaaattctaactcagaaaagttaaaacactacatagcgtgaagaacacctatgttcccttcacctagattgaccaattattagacactttgccacatttacctcactttttctctcatacatattctttttctgaacatttaaaagtaagatgcagaaacccaaaccctaacacttcaatgcctgaatatttcagcatgctaagaataaggacacattatcacaataccatcatcacatctaagaaaattaacaataattccataatattatttaatttatattccctattcacattttcacagttgtctctaaaatgtcttttgcagctgtgttttttttttcctctgctccaggctctcatcaggcttcatgcattgcatttggttgttctttctttctagttttagactgatttttttgaagcatcagcccacttgtcttgtgtaatgtcccacatttttggatttatctgattgtttcctcacgattgggttcaagttaaacatttttggcaagaatacttcgtaagtgatgtgtacattttcttgcaagggccagatactaatattttacactttgcaggccatgcaggttctgtcacaactactcagctttacggttccagcaagaaggcagccatagacaaaatgtactaacgagtgtggctgttttcccatttatggacactgaaatctgaattttattccgtttttatattgtgggatattattcttcctttgatttgttttttttttttggacagagtctcactgtgtcacccaagctagagtgccgtggcccaatcttggctcactgcaacctccacctcccaggttcaagtgattctcatgcctcagcctcccaagtagctgggactacaagtgcgtgccaccacgcctggctaattttcgtatttttaatagaggtggggtttcgccatattggccaggctggtcttcaactcctggcctcaagtgatctgcctgccttggcctcccaaagtgctgagattacaggcgtgagccactgcactggccttcctttgattttttttttcccccaaccatttaaaaccataaaaaccagtgttagctcatgggttgcacaaaaacaggtagtgggttggatttggccaacaggctgtatgtagtttgccaaccactgttctgtgcattacatcaggaggaacatagtattagctaccttactatttgwgaggctgaatcatttgcttttaagaaaatgaccattgattttcttcatttataggtacatatgtatccctttgtattagaaagaaatctataggatcatagttcragatagtattcaaaatccttttcccaacaacatttcacagaaggttttcgttttcccatctattgatgattcttggcctaaatcagtaattataccaggaattcaaattttatatcttattttttttttcttttttttgtcctcacaatctgttcccaaggaattctaattttaattagaaaattttaattgcatctttctttcggcattattagctggcattcttctgtaaaaagagcctctcctttccctattgttttgaatatcattatgcactcatgaacctttttaaattcaatgtacttattattcattactgtcattatttgttttgagcacaaaattacccaaatttagccagttggatccttcaagtcagcttatgtgttcttttgatgtgaccccatttagtctttgagcttgtggcatgatatgcccaaggctcaccatagtactttctttgccccatcctgatgctagccatgtctctaaaaagccctgggtcccttctgtaggaaaggatatttaaagaccataatctgagtaggctttaaaacttctttatcttctctgtatctgttcactctttttttaaatttaggttcgtagtaactatattgctggcctttttaccagctttatgtattttgatccagtctgttgttttctttttgttttccatttgattgctgttttattttacattttttttgttttactagtatcttttctaggccttgaaaatgtattctttaaactttttgaggcacaatttacatagcacaaaattattttattctaagcatgcaatccagtgattttttttcataaatttacctagttttgtaactgtcactataatccaattttagaacattttttatcaccctgtaagatcttttatgcccatttaatctgcattagcactcccagtcccaggtaaccactaatctactttctgtctctatagatttacctttcctagatattttgtataaatggaattatatgatatgtggtcttttgtgtatgtcttctttcattaagtgtaatgttttcaggattcacctgtgttgtagcgtatgtcagtatttcatttctttttattgttttgtttgttttaggagacatggtctcactctgtcacctagggtggagtgcaatatcatgatcatggctcactgcaccctcaaactcctggcctcaagtgatcctcccactgtagagttctgactagctaggaccgcaggcgcacaccaccatgcctggctaatttgtaaacaatttttttaagagatggaggtcttgctgtgaactcctgacctcaagtgatcctcctgcctcagcctcctgagtagctgggattacaggtgtgagctaccatatcaggctcatttctttttattgttgaatagtattccattgtgtggatatatatgagttttgtttagcagtctcccagctggtggacatttgaattgtttctactgtttggctattacaaataatgctgccactaacattcaaatgtaagtctttgtgtggacatacattttatttcttttgtgcatatatccaggagtagaactgctggcttatatgagaaatttatgtttatatttttaagaaactgcctgttttccaaaacggtatcattttacattcccactatcactatgtgagggttcctatttctctgtgtcttggccaacatttgttattgtctgtcttttttattatatccattctaatgggtatgaaacagtacctcattgaggtttaactttgcattttcttaatgactgatgataattgagcatcttttcatgtgctcatkaactgttctaataccttctttggtgaaatgtctattcaaatcttttgcccgttttttgagtgtgttgtttgtcttcttaattaaaattctttgtatattctactgacaagctcttttttattttttcaataactttgttatgaatggtgacaagttctttatcaggtatataattagcaaatattttttctcagtctgtgacttgtctttttattttcttaatggtatcttttgaagtacaaaagttttaaattttggtgaggtccagtttatcaattttttcttgtagaaattatgcttttggtattgtatgtaagcaatctttacttaatccaaggtcttgaaatttttctatatgttttcctctaaaaatattacaatttttgctcttacatttggatttctgatccattcaaggacctatttttattttttattactattaaaaaatgttttttatgtctctcgagtcataaggacttttttgggggrtgcagtggcgcaatctgagctcactgcaaccttcgcctcccagattcaagtgattctcctgcctcaacctcccgagtagctgggattacaggtgtgtgccaccactcccagctaatttttgtactttacaagacagggtttcaccatgttggccagactgatcttgaactcctgacctcaagtgacccacctgcctcagtctcccaaagtgctggcattacaggcataagccaccacacccggccaagggacttactgttaaataggctgttatacttttaagatgtatgtaatgggaccaggtgtggtggttcacacctgtaatcccagcactttgagagrccaaggtgggaggatcacttgaggccaggagtttgagactctcctgggcaacatagtgagacttcatctctccaaaaaaattaaaaattaaaaattaaaaaattagccaggcatggtatagtcccagctacttgggaggctaagccaggaggatccgttgagcctgggaaatcaaggctgcagtgagctatgattgcatcactgcactctagcctgggcaacagagagacccaatctttttttttttaaaaaaaaaaaaaaaagaaaaaagaaaatgtaagtaaatgacttccttttggttgctctcttctaggtaggacagcaaggagattccaataataacttaagtcccttcagcattgctcttcttctgtctgtaacaagaatacaaagatttcaggaccaggtatttttttaaaatgccattttgtttctttctgtagttggtaaaaaaaaaaaaaaaaaaaaaaaatcacagtaatctgtttttgttgtatccgttcctaaacaattttatccccttcctgccagcagcaaagctgcaataagacatgtatgtcccctctgttctctggggattgatggaaaacttttacaggtttttggtttattcctccgtttcctgttgtgtggtaagctaggtagtgaggtgggaataagagtggaaggataccacacagccccagttggaagggacaatttagctggatattcaccagcagttttactatgttgtagctttccaagagtaggttagttgcaaggatgaaatttacaatttttttcttatatgtgttccaggttgtgggtaatatttatattgacttttagccttttttcccccttttttcttaaggaaggcttgtcttcagctccttaaagttcccactgaatgtcataatttttgtaacatcttcatctagttaaaatagttgtcatagggatatatgtgaatggcagctcataggaacagttataaggttaagatttatagcatgagctatataatatttgctttattttcttatttctttcattctgttaggtgcttgatcttttatttatttattttttcatttatttttattaactatactcaaggtgcttgatcttttaaagacttcggttgtaaagagctttaaggatcttcaactcctccaaggctcaaaatttcttcagaatctagttcctcatagatcttatgtttcaaccatgatcttggaagtagtgaagaataggtaagttggtgaaccatatctcaaaaggtttataaggtgtttaatgttagaaaatgcaatgtgatatcatacttgcagcctgtgaggggaaactgatgacttaacagctgttgacgtcacacatcgaggttcattttcttaaaactggtagagcatactttttccctatggaaatatccttgaatctcaggccctggtttcttggccaccttgacagcaagcatacaaaactgaattagttgcttttgtttattccatgatattacaattctctattttccttttctttctttccttttttttttttttttttttttttttttgagacagagtctcactctgtcaccgaggctggagtgtagtgccacaatcttggctcmctgcacccttgacctcctgggctcaagcaatcctcccacctgaacctctcgagtacctggtattacaggcatgctccaccatgcccaagtaatttttgcgttttttgtagagacagagtttcgccatattgcccaggctggtcttgaacttctgagctcaagcaatccacctgccttggcctcccaaagtgctgggattacaggcttgagccaccggtcctggccgtttcttttcctttttaaaggaaacagtctcactatgttgcccaggctggagtgcaatggctattcacaggctctattatagcacggtaaagcctcaaactcctggcctcaagtgatgctcccacctcagtagctgggactataggcatgtagccctgtgcctggcttggcctttcttcttttttttttttttttttttctgaagacgtaggaacttttcactatgttgcccaggctagacttgatcttctgggctcaactgatcctcctgcctcagcctctcaagtagctgggacaataataggtgcatgccactgcatctgactcatggcctctttttaaagtgagtaaaaaacattaagagttttatttactttgttgaaatttggagcgtacagttggaattcaattattgattagccagtttagagaaattcatttaaaaccacatggaaaacatcagtaactgtcctggtttttattttaatttcaggatatacattagctgttgtaacagtctttactatgtcatgctttcactgtgtattaaatatattttaaagtttcataatttaagcataatttatggtaggcctcttctaggcctggaattcttgtttattaatagattgaatttacatgagctttgcagtagggcaaatttgaaattagagtttattgtttgagtgttttacccattgttaggccttaaagctttttaatctttgtatctcattattctttttcctgaggtttatacttgtgtctccagtattttcccaacccaatctcttaaagttgggctaaagaaggaggtactcactaaccaggaaattcctggaaagcttcccatcttctggaaatctcaactgtcataggacttgaaagcatctccatgtataattagcctggagtgggtacttgccactgggtgggaccaaacctcagctgggagagatttggatagccttattagatcctctaaaataactggctggttagttacacatgcttgccccagtcagttaatgaacctttaaataatgcattctccattttatgkaattgaatttttggctcttcagagtatgaatattgttaactctgttaaagtcttataatttatccataactgtctacttcattctgtagtgctgcattataatttgttgcaatttaacaggtagatataatggataaaggttatattcacattatttccactgtggggtataacattaagtggtataaaaccaccaatgattctactcttttacaaaagattatttgtagttttagcttatgctgttgataccagatcactcatccatttatagtataaatatctactgagtgtcttttatatgccacccttgtgctaagcaatgtgggtaaaaatatgactatactatgacctctctcctagagaatctctgtctttggaggggagctaatttgtaagcctctacataagcgttgtcagtgctgtagggtaatagaagaggcagcaatgaacttctcatcatgaaatcttgaataggaatctttaatttttttaatactctctagcttctggattttcccagtattctgtgtgtcattggagaccacttgcctgctgttcccattatggtacatttaggaattcagaattctgtcagacgatgtgtgtaaagaaaaggtttatatgcagagtacgttgattatctaggtcaagtttgggaaatgtataacagggcaatgagtataaaggtaagaatatctcactaagtttttcttttttaactaagctttgtgttcttgtagcgttcatagctgggaccatgttactcagggcctcgtagaacttggtttcattttgatggattcataygggccaaagaaggttcttgatggaaaaactattgaaaccagcccaagtctttctagaatgccaaaccagcatgcatgtaagctcggagctaatatcctgttggaaacttttaaggtgagacactattttggcaaccactccctaattttgtttaaataatccaagtagggcttggcatttgcctgggagtttggtggacaaggaaatttgagtatgtattagtttgacagaggatatatgacagagattaggataatattgaaacattatagatccagtttgatggaatacttacttacgtattcttctatgtaagtttttcatttattccacttaatccaattgtttctgacctagaagtttgaatataagacagctttttcatgatttttccttcttcttccagaagtaaaccatttctagtttttgttttgttttgttttaatgctgttcctttacacagaagaaatttttttaggtcactgtagagcatcaagcttaaagartcatgcttaagaatttttactgaaaataaaacaaagaatcatgcttggtcgggcatggtggctcaagcctataatcccaacactttgggaggctgaggtgggcagatcacttgagctcaggagtttgagaccagcctgggcaacgtggcgaaacctcatctctacaaaaaacacaaaaattagccaggtgtggtggcacgcacctgcagtcccagctacttaggtgactgaggtggatcacttgagcccaggaagtcaaggctacagtgagctgtgtttgcaccactgcactccagcctgggtaacaaagtgagatcctatctcaaaaaaaaaaaaaaaaraaaagaatcatacttattggttcattgtttctgaagaaaccaaaatgggaaatgtacatttttttgacattattaccaaattatcactgacatctcmatcttaattactgaaacagttttcaaaaatttattttctcttgaataaaaaaatgctagatcatatctgaggttaaacaacttttctagtaattcctctaagtcttcttgatgttcaattgtttaatgtagctacacaccaagagtgtctgctgaaaatgtttatttgggaggctgatctaaatgtaaatctagtgttctaatccagaactatgaagtaaatgtcagaatagttcttgagagttatcagtgtatttgatgatataaattaccctgcttaacagtgatattgttaaagacattatcttagagtatgtttttatatttaaattattatttttcaaaactaaagaggctccatttgatttcacatggatgtcggctttatcaaggcatctttataaattgctactaagtcactaacagtctgaggtctgaacgaattagtctgtaccataaagtaatcaagttgaagtaagaattttaactacaattcaagtgaaaattcagaatgggtctttttaacagcaactgctgtgcttctagaaactgagaaaggggttagggaagatcttttaagtttctagaaatcttcatgggcttttacattttaatttttagaataaaagttatgtatactgtcaggaatatggatattgtcaggtaatggatacctaagtagaattgatcctgtttgatgctgaaccttatatgtagcaatagtttaatgtgatctgtacttttaggctaataaacatggtatttatcctactaatraatcatctaagcacagaacaaggggaaagttgagtgattctgtctttccagatgattcacattatattctgattttttgagttttactcatatccaaacggttcttcatgctgcctgacatgcattgatatacttaaaagctgaagggtcacccaggaatattttatttattctgttytttttagatccatgagatgatcagacaagaaattttggarcaggtcctcaacagggttgttaccagagcatcttctcccatcagtcatttcttaggtattcaactttgaaagaatgaataaagtttttagaaatattttcatttcaatgtcataatcatttggtcctgggaaaaaaattttaatgagcatttaaatgcagtatctttgataggatgccaataaaggaaatccatttatgttgtctgggattgtcagttgtcaaaaaggctgtagcygttagtaaggaaagcaacaattaaccaataagkaaaacttccattttgctcaacattttctctttttgttaatacctctcaaatgagtgctgtcctgctgctgccactcattgacttcctagtccttttagccttgacatttggactgcacagtgtttctctctggtaacctctgaatttgctgttttgttgttgttgttgttgttgttgttgttgtttcttttttagacacagtttcactctgttgcctggagtgcagtggcgcaatctcagctcactgcaacctctgcctcctgggttcacgcagttctcgtgtctcagcctcctcagtagctgggattacaggcgcacgctaccacacccagttaatttttgtattattagtagagacagggtttcgccatgctggccaggctggtctcgaactcctgacttcaggtgatccacccaccttagcttcccaaagtgctgggattacaggcgtgagccaccatgcttggcctgaatttgctgtttttaatacataactcctaatgtctaaatttactagccttcatcacaaattttaaaaatttctccgtgtcattcatcactgtttataactcccctgaaactttttaggtaagttctctgattactgtaagagtctgcttcttttcctgcctgtgaccagttttccttttacctcaaatataatacagttcccttcaaacaaattttccttttcattgctcctatttccattatttgaagcatggttctccaggtcctggaggctggaattaccttttattttctcaaacacaagttctgtcatttttctccctcatactgtcattgtttctatctttttattccctcctcctcccaacctcacatccagtgtctaattcctattcttactaccttgaatttagactactgccacagctttctaactggtttcctggctttttcttctccctgcagcaatttaacctgcatattaccacacattagtattcctaaaataccaccttatgactacagaatcatcaatatgttctttagtaaattgtcagctctttttgtttgtttgttttttgagatggagtctcactctgtcacccaggctggagggcagtggtgtgatctcagctcactgcaacctccgcctcccgggttcaagcaattctcctgcctcagccttgagagtagctgggactgcaggcacgtgccaccacacccagctaatttttgtatttttagtagggatggtgtttcaccatgttggccaggatggtctcaatctcttgacctcgtgatccacctgcctcaggcttccaaagtgctgggattacaggcrtgagccaccacacctggccaaattgtcagctctttatcctggcactgaaggtgcttgacaagttgatcccaccctacctttccattgttaaagtcagttatttactttcctggattcttcaccccagcatcattgatttccctaccatcttctgaatatgtcttaaacttacctttctcatacctttactcatacttttccctttatatatgtaggcctttctggtgctttgtgcatttaaatgttccccatcttttagaacctagtttaagttccttctcctcattgctttcctaatatataccaactcataatgagctcttcttcctttgaactcctatttaaactctccctttaccatttggtaggcaataaactatgtttggaattaatagatatttgatattgctctgtgatttaccyctttaattctttaaaaaaatttttttacttccaactaaattattaaaatttttgaagaaagactatgttttatacttttatgttcctaataggaccatattacgctkgtgcatagtaaaaattcagaaatatttattgatttattttagcttagaagtaagaagatgtgtgctactacttatgtctaggcagtgtaatcggtttcttcctttcttttaggcagtttaatttttatagaaattgaaactatcatagaaaaaagctaaaattatcctggttacattggagaaaaagtatatatagmatcagtagaaatttgtattgcagtatacttgacttatttgagaaaggaaacaaaagacttcacatttctttctccgtatttttcttttatttcagttatctttagttatttgagacaactgattatagattctgtttttcagacctgctttcaaatatcgtcatgtatgcacccttagttcttcaaagttgttcttctaaagtcacagaagcttttgactatttgtcctttctgccccttcagactgtacaaaggctgcttaaggcagtgcaggtaagtcttcagattcccaagtaacttgccaaaactgaggtttaactgtctagtggaagtctgatgcatttytgtataaatatatatgtctaagaaattctattccactttagtctgaaacataaaatttgcattaaaagggcaagagcattgagcaagactgttttccaggtttatttcctatccataacactattctctcaactcattttcaagttaatgaaataattaaaactctcttagaacattattgactacaatagatttacagaggcatttgcaaccagtttcattttagtgtttcagagtataytattgtccttgttaactgtaataaacattaaaacgtatataaaacagaagtaagcttccttatagaagccatatgrtaacagtattgggtagaaatgacstaaggctaataagcaaacttgttctgtttttacccactgattctttttcagccccttctcaaagtcagcatgtcaatgagagactgcttgatacttgtccttcggaaagctatgtttgccaagtatgtagcatctttttctatcataggaagacgttgtcttctaatgttggagctaaagttatctctgccatctcctagtaccacctrttcacagtgatcatgagaattcctagccccgcagagcaatttcatcaaataaggcattttgctaagtgctttatgtgcttttttcatttagtcttcagagcaaccctatgaagtaagaattattgcaattcccattttacagataagaaaagttaggcttagagaagatgagtgactttccaaaagtaaaacagtagttggtggtggagcaaggattcaaagtcaggtctaacatcagagcttgtgatgtcaagtactttgctctactacattagaataatcttcagggtaatgttctagtgtcaaatactctgaaacctgagctggcagcagttccaaaggggaaagtaccttagtcaagaagattatacttaagaatctcattttagtgaacatctgaattatgatctagaggctagtagatcaaattaattgttgaggggaatgagttttatttgtagcttagccagtccctcctaacatctcttcctttatttcttagtatataagctagagatgatcttgccatctcctaaaaatataagacagtaatatgtgaaaagcatttggtactttgaggataagatgcccaattaatatcacattggccatattataatatattcatgggtgtccagaggaacaactaagccatatgctattatctttgttctagaattaaaagtttttgttactcctcacccaaaggcatagcgaatagactgagatattacgttgtaacatctttaacatgaattaatcattgcgcctcagtgagaagacaagtgtgacattttctggatggacagtttacatggcatcaaatattacattatcctatgatgaaagagagcatatgaagggaagcactccttcaaacatggcaaaatcagcaatttcttacatttgagtaaccagccaattttacagtctctcagcagtcttcttattcctcacatagacttgagagcaggatagaaggaagtagagtatcatgagttaagtattgaaaaaagtcagttgaatttctgtactataaattgctttgaacagctgataccttattttgagtacataaattcactttgtttkgctctacgcttcattgtttatacatatgccttctctgtatgcaactagctggattyttctgacccagaagcatattcctgtgaaatagtactgtttgttaacttctctatttctgagctagccagcttgatgcccgaaaatctgcagttgctgggtttttgctgctcctgaagaactttaaagttttaggcagcctgtcatcctctcagtgcagtcagtctstcagtgtcagtcaggtaaggattatttaygttaacttgcagtgtgtgcgtatcattcatgtgcatcgatgaaatgcacgctgttttcttttattcctgttatggttgtaagaatgatcctagaactaaagagtctgatgatgatgatggtgctgatgatgatgatgatgatgatattggctaacactcattaatggcagatttactgtatgctaaactgtgctatccagtatggtagccactgtcctcagtgtggctattgaatggaacatttgattgaaatgtggctagtccacattgtgttgtgctatacatgcaaaattcataccagattttgaaataaaagaatgtaaaaatctaataatttttaatattgattacatcttcagagagaattttgtatgtgttgggttacagaaaacattaaaatttgactttatctctttctcttttttaatgtggctactagaaaatataaaattacatacatggcttgcatttgtggttcrtattatatttctttctttttttttttttgagacggagtcagtctgtcacccaggctggagtgcagtggcgcgatctcggctcactgcaactcactgcaagctctgcctcccgggttcacgccattctcctgcctcagcctcccgagtagctgggactacaggcgcctgctaccgtgcctggctaattttttgtatttttagtagagatggggtttcattgtgttagtcaggaggtctcgatctcctgacctcgtgatccacccgcctcggcctcccaaagtgctgggattacaggcgtgaaccaccacacccggcccatattatatttcttttggatagcacggtgctagatattgtgccaaaatgctttacatttattatctcatttaatcttcacagcagtcctctgaggctagatactattattatcccattttcttacgtcaktgtatttactttgcacaggaacatatattacaccttgtaatctgggaaaacaaaactttttataataatctggtaatctaggctttggagcaataaaattgtcttcataatttaaatgatgtactataagatttataaataggagacatttatatataacagtttgactaggaatcctcactttattgctttggtataactacataaagctttgtctataacatatagcatagattaaatattaggaacactagrtatcatttgtgtgttattatccccattttaaagacagggaaactgaggctgagccaggttaaataacttgcccaaggttawataaccaagaaagggtggaagaaggatttggcctcaggcagtatgaactacattactgtgatgcctggagtaaggattaggaattcttggtctataattgctgattttattatgtaatttacacaaaggatgtcagttctttgtcatgtccatttctaaacaaaagactgtcttcctctcaacctttctagaatttgtggaatagtgagattcttctagctattgaagaagtcttagaccttttaaataaaattatgtatattgttactactggattctagtggcttgaaataagcagtgtaccttcctaagcaattgatattgtcaaggaaaccttaaggaatatgaacagttaattttgttaaaatgcttaaaaattctcttattccaaaccagaataagagtgacacttactactgcatggtaatgattatactgtgtgtctcacccctggggtttggcatgtggaggaagctaagttttttcgaccaagaacataggctcatttagctccttattggaaacagctttggtaagatagacgtgaattggcctgtcttcmtttcaggttcatgtggatgttcacagccattacaattctgtcgccaatgaaactttttgccttgagatcatggatagtttgaggagatgcttaagccagcaagctgatgttcgactcatgctttatgaggtaagtccgtagaatggaaagaatgtagcaaaaccccaactaataatttttattttagtaatttttttcctgattataaaagtacaatagctatgctcttacttgatgtagtcagcaccagtagctagtgatgtttagtcaaaaagttgtttaaggcagggcacagtggctcacacctgtaatcccaacaccttgtgaggccaaggcaggaggatcaagcaagactctgtctttacaaaaaataagaaaataaaaaacattagctgggtgtggtggcatgcgcccgtggtcccagctactcaggaggctgaggcaggaggatcccagcagtgaggctgcagtgagctatgatcacaccactgccctccaacccaggcaacagtgagaccttgtctctcaaaaaaatttttttaaggtgagaaatcataaaacacagttgatagaccttaaatattttattttaatttgaaatatttaaatatactataaatttgccagtcttaagactaagtcctttttttttgctttgttaatgattacaagtttacttcctgcctctcatacaaacccatacccttaatttattgcctatagtttcaaatttgtgtttacctaaagtggtatgaaaactttaagctacctcagatacagtttagcacaaaaatcttttagatagcttcagttttttctctttttacaattgtgttacctctaatttatcagaaattggtttgagagactgactttccaaacattkttccaaacttagttttttttttttctttgggacagagtctcgctctgtcacccaggctggagtgcagtggcacaatctcggttcactgcagcctccatcctccatctcctgggttcaagcagttctcctgcttctcaacctcccaagtacctgggattacagccatgcaccaccatgcccagctgatttttgtatttttagtagagatgggatttcaccatgttggccaggctggtcttgtactcctggcctcaagtgatccacctgtctcggcatcccaaagtattgggattacaggcgtgagccaccatgcctggcctaacttagtttttataaaagcaacttctttttctttttgcactgggttttcaacagtttactgaacgtctgattaaatcactagttattatgacagtacagctaagagaaatacaactactgacttgtgattagcatataactcacccagaggatattgtggtagcatatgtgaaaacaacattcatctttctgtacatttccatcagagctcttagatgcctaggtgcactatcaatgagcagtaatattttgagargaatctttttttttctgagcagtaggtctcaacagtgggcttaaaatattcagcaaaccatgctataaacagatgtgttatcatgcaggctttgcttttccatttataaagcacaggcagagtagatgtagcataattcttaagggccctaggatttttggaatagtaaatgagcattgatttcaacttaaagtcagcagctacattaacccctaacaagacagtcagcctgtcctttgaagccaggcattgacttctcctccctagctaggcaagtcccagataaagtcttcttccaatataaggctatttcatctacattgaaaatctgttgtttaatataaccacctcgatcaattatgttagctatatcttctggataatttgcctcagcttctccatcagcatttgctgcttcaccttgcactttttttttttttttttttttgagtctcactctgtcacaaggctgtagtgcagtggcacaatctcggctcactgcaacctccgccacccaggttcaagtgattctcctgcctcagcctcccaagtagctgggactataggctcacgccaccatacccagctaatttttgtatttttagtagagactggggtttcaccatgttggccaggatggtctcaatctcttgacctcgtgatctgcccgcctcggcctcctaaagtgctgggattacaggcgtgagccactgcgcccagccccttgcacttttatgttatggagatggcttctttccttaaacctcatgaaccaacctctgctcgcttcagcttttctttggcagcttcctcatctctttcaggctttatagaattgaagagtttggtccttgctctggattaggctttgacttaagggaatgttgtggctggcttggtcttttaccagaccactaaaactttcttcacatcagcaataaggctgttttgctttctaatcattcatatgttcactggaatagcactttaaatttcctttaagagcattttctttgcattcacaacttggctctttggtgcaagaagcctagcttttgacttgcctcagcttgtaacatgccttactaaactggatcatttctagcttttgatttaaagtgagagacgtgcgactcttcctttcacttgaatacttataggtcattgtaggggttattaattgacctaatttcaatattgttttgtctcagtgaatagggaggcctgaggagaggtggagagatgggatgatggcccagtcagtggaaccagtcagaacatacacagcatttatcaattaagttcactatcttatatagacacaattcgtgactcttcaaaccaattgcaatagtaatgtcaaagatcatttatcatagatccccataacacatacaataataaagagaaagtttgaaatattatgagaattaccaaaatgtgacacagagacatgcagtgagcacatgcttttggaaaaatggtactgagagacttgcttgatgtagggttgccacaaacctttaatttgtaaacgtaatatctgcgaagtgcaatcaagcaacttgcaataaaattaggtacgcccatattctgtataaaccacattgtttaaacagttaaggcacagtgagccactcttctttagggtgagctttgtgtcagtgtaagtaactgtttaccagctaaattctcagccaccagctggcaaaggtgcactaaggataggcagtcttagacttcatgtgttaactcttgtgcagtccttgatatgccccttcccccccaaaaaaaatcttcacccttatttagctctaaagtaaaaaaaattaacatgaagtggatcatagacttaaacctattagaatattgctgttcatttattcatcagtcttagtatatcattggtatataaaaataccttatgtagtgataaaacttgtcatatttgttgcaagtgtatgccagattgccatttgctttttttttaatatgatccttttacacttaaataataatttttggttactaaatctattgattttcttcctctgagatgtcttctattacttttttttttttttttaagagacaragtcttcctctgttatccaggctggagtgcactagtgcagtctaactcactgcagcctccagctcctaggctcaaataatcctcttgcctcagccccatccccaaacgattgggaccataggcacaagccactgcacccagctaatttttctgtttgtttttttttttaaccttttgtagagacagggtctcactttgttgcccaggatggtctcaaatgccctggcttcaagcgatcctcctgcctcagtcttccaaagtgctgggattaaaagcatgagctaccgtgcccggcccatctttattattattttatctgtagaaagtccaaatccttccaatgaatatwcactaacattttctttgaggtttttttttttatgcatttgtttttgacgtttagctacttaattcatcctgaatttgtatgataatatatatgaggagcttttcccccaagctaaccatttgttcagacatcattgcctccttaatgtgtactatgtatctctgtatgccattttaaaattttgcctgtagatttttgtgccaagacaaagtgtctttttattattattacacattcataaaatattttaattgctgttaggattaattttcctttgttccgttcctttcccctttcccctttttccgttttcctttcctttccgatggagtctcactctgttgcccagactggaatgcagtggtgcggtctcgggtctcagctcaccacaacctccccatccccagtttaagcgattctcctgcctcagcctcccaagtagctgggatcacaggcgtgcatcaccatgcctggctaatttttatatttttagtagagatggggtttcaccatgttgaccaggctggtctcgacttcctgacctcaggtgatccctcctgccttggccttccaaagtgctgggattacaggcatgagccaccgtgtctggcctgtttcttttctttaaacaaaaaaatttttttgatcaattctcatttgcttttactcacagatgaactgtataacctcttttccaggttccagaatgaaagttctccccaggattttttttttttttaagacagagttttgctctattgcccaggctggagtgcactggtgtgatctcagctcactgcaaccttcatacctcagcctcccgagtagctgtgattacaggcatgtgccaccacrcctggctaatttttgtattttttagtagagacrgggttttgctgtgttggccaggctggtctcgagctcttggcctcaagtgatcygcctgtctcagcctcccacagtgctgggattacaggtgtgagttacttcacctggcttccccaggattttactctgagcagttcttaactaagactaggacattttgggtgggaaaaaaatatggtcatttatattagggcatttaggactgtcaaatatggtctcaataggaaaaaactgagaagaggataaagaaagtgttatttttaagttatgattgtccagatcactagtatctctgttaaagtgcttatttcttctctttgattcctcttaggggttttatgatgttcttcgaaggaactctcagctggctaattcagtcatgcaaactctgctctcacaggtaaaatacatttttatggatatatggaaaacagaccatcaaggatcgagagacagttgatggttttcagacctttcaaaatataaaataattcccaactagtacattagtactttgtgaacatgctgtgggtatgttatgctgttctgggttgtcttatctcggtcaccacttacctgtctgccataataccatcatctagcagttatccttgtgaattaacagtctgtatcctaagtcagaaggacattttgaagaaccatttatataaggaccattgcaactgtatccattatgttatatttctgaaagaaaaaagaaatccaaaacaaatatagcaaaatattatttcttaaatctgggtaatggatacatggatgtcttttacattcctttctgcacttttcagttaacaaatttttaaattagaagattaaattcttctaatcttcaagactagaagaattcatatagagactctctaccaggagggttcctttagacccctagtctatcattttgtttgctgtctctcaatgccattgctttgtgatagttatgaaatttcatttaaaattaaggtctcagatgtgtgaaattattggaagttcccatactgtccatcaaaagcttttcatctggccttaggcttgatcctatataaaatttatattctgtcagctatattgtatctttcaaactgtaatcaacacatctacattcacacgtttaacaaaaatagaaaattatgtttgaaggcatagaatagcgctttctgactcaggttaatatgcaggacagtaaaattctgcagactccaaaagttaaaaggagaaaaataataactcatattttttttggctgtcttatatgccaaatactgtttgaagtactttacatgtattgtcatgtttaatccttatacaatgattattaataatatcctcatttttaagatgaggaatcacggtacagatacttttataaaaaccagtaataagtagtggtactgggatcttggactcagccagtctgactctggatcctgtatttttaacctccaagttaactgaaaatgttgattgcatgtacaagtttaggaatagaaggaattggaataggaaagatgatcctaatctgtacaatatccaaagcaagagcacaggatgtgggtgagccaaagaaataaaaacttggctgcattgttctttgaacagttgggaaatgtgtgttagaaggcattagacattaaagatacctttcacctgagaagttaaaaaagtaaaaagcatttatgagccaagatgtcttttttttcttactatacacagttaaaacagttctatgagccaaaacctgatctgctgcctcctctgaaattagaagcttgtattctgacccaaggagataagatctctctacaagaaccactggtgagacttttattcttccttcaaccattatttttagtattaaggatagggttgaactttgcaaagagatacctttcccygtgaaactctcttcctggttcttccaatgaatgtttacttttaagtcttccctgcttatcatttctgaaccattatcattttggatctattggtaagttatctccatgttagccctttactaaatcaaggcttccatcacttcccccagagaatattttatctcatttatgaatctttgattacattcactaaataaatgtactttagaatggggagagggatgatgtcacctacgaacagatgaacctaggggacctgcttcattagtctagaggaagtatatgatttaggctgaactaggattggcactgttgaaccttcagaggagctaggcctggttgactttctgttcttatctagcctcagaaggacagcgaagaggataaaaatggaaactcccaccccaagtgacttataactcatggcagaagaaaggaggaagtctttcagttgtcatatcttgccttcatttttgtgccttctgtgacatgagatgtcctcagcctagatctaagatgctgtgttggtctcctaaagattccctcaacataaacctctatctttagaatagcctctgggactcaaatgaactagagaagatttaacttcaccacctagctccagggttatttatcagaccagagatagcacatctaatgttgcattttgaggtgtcagccacttaggccaattttcggggggaagcattagaaaaggatgctgctgttcaattaattttcccagttttgttaatttagatggacttaatttgtaacgccaatgaatcattttctttagccttatagataagaattatttgctggttatgaacaactttataagttatccatcaacactcaagagtatttaatttacttattttctcctacaggattatctgctgtgttgtattcagcattgtttggcytggtataagaatacagtcatacccttamagcagggagaggaggaagaggaggaggaagaggcattctacgaagacctagatgatatattggagtccattactaatagaatgattaagagtgagctggaagactttgaactggtaattgctaagtcctcagctgtattgaatgatggagttctttagtagcttgttaatttttatcttgtgtcttttaggataaatcagcagatttttctcagagcaccagtattggcataaaaaataatatctstgcttttcttgtgatgggagtttgtgaggttttaatagaatacaatttctccataagtagtttcaggtaaggttttgctataactccatttgtaatttgatgaattctccattttatttacatatttttactgtagcagtattctaggcagtaaacagaccacagacgatgacactgtctcttaaatgagcacctagtctaagactaaactgtgttctttccactagagagcgctgaagtatatgcttaccaggcctataaaatgaaagccttccagcagggtttcacttactcagaatttcccagaccctgaattcaagaactcctaattttaacatggaaattttgattggtggtagtattggactttaatactctgcagggactggtataaataagggaggggaggccaggtgcggtggctcacgcctgtaatcccagaactttgggaggccaagctgggtgtatcacttgaggtcaggagttcaagaccagcctggccaacatggtgaaaccccatctctactaataatgtaaaamttagccaggtgttagtgcctgggamctgtagtcctagctactcgggaggctgaggcaggggaatcacttgagcctgggaggcggaggttgcagtgagccaaggtcacaccaggggaaacaaaacccagatagattgctgtgacctgggagtattatattaatgaagttctattcayttataatgttacgtctaaaatatgacatttaaagaagcattgtgattattatcatatgtaaaagtaaaccacaatattctgatgtttgtccttagcggtctcttttttgttttttacagtaagaataggtttgaggacattctgagcttatttatgtgttacaaaaaactctctgacattcttaatgaaaaagckggtaaagccaaaactaaaatggccaacaagacaagtgatagtcttttgtccatgaaatttgtgtccagtcttctcactgctcttttcaggtaaggttctgctagagtgcttaaagacagccactccctgaggatcgtatacctacctaggctcacttgtttcacctcgtttggattgtttacagtaagaaataagtcaggaggttttatttttcttgaaataaaagctggacaatcctaggtaggtactttaagtaggtaccttgaattattaaaggacaaatgagaaacagtgggccaataaatgaaaagatagggatgaattccagcagggtgttttaagaaaatctatgtaagtagcttgtacaagataacagatataaaaaggtagggggtgccaggcatggtgcctcactcctgtaatcccagtactttggtagactgaggtgggtggatcacctgaggtcaaaagttcaagatcagccatgaccgatatggtgcgacctcatctctactaaaaatacaaaattagccgggcatggtggtgcgcacctgtagtcccggctacttgggaggccgaggcaggagactcacttgaacccaggaggcagaggttgcagtgagccgagatcatgccattgcactccagcctgggcaacaagaacaaaattctgcctaaataaataaaaaggtagggggggtgactgaattaaaaatacaaagggacaaaaaaaaccaaacctaaaagactaagactgacatttaaattttatcaaagtaaaggatttggggagggagagaaaatgaggaaccactaagaataacgattataaaagggcagccatagcagtgactatagcttgggctgcctagagagtctgccagtcggaacttactggsaagctctgttrggtgctgctgttctgaacaatttctagaaagcttaattccatataccaatagcagtaagggaatcttcctttttctttctctctctctgtctctctctagggatagtatccaaagccaccaagaaagcctttctgttctcaggtccagcaatgagtttatgcgctatgcagtgaatgtagctctgcagaargtacagcagctaaaggaaacagggcatgtgagtggccctgatggccaaaacccagaaaagatctttcagaacctctgtgacataactcggtaagccactcccaccccttagaaacttattccacttggctgtggtgtctccaagagaacaaactgggaacagaggatgaaggtaatttgaggttggacatattttaggagtgaaagaatataaaacattagccaggtggcaggcacttgtaatcccagctactcaggaagctgaggcaagagaatcacttgaaccaggaggtggaggtcgcagtgagctgagttcataccactgcactctagcctgggtgacagggcaagactctcaaaagaaaaaaaaaaaaaaaaaagccagacatggcagctcatgcctgtaatcccagcactttgggaggctgagccgggtggattacctgaggttgggagttcgagaccagtctgaccaacatggagaaaccctatctctactaaaaatacaaaaattagcctggcatggtggcacatgcctgtcataccagctactcgggaggctgaggcaggagaattgctcgaacctgggaggcggaggttgcagtgagcctagattgtgccattgcactctagcctgggcaacaagagcgaaactccatcttaaaagagtgaaaaaaagtgcagtcattgacatagggtcttttttctagtcttgccttcccctggcgccccccccmcctttttttttttgttgttgttgttgttttggctttttttttggctttttttgagagagtctcgctctattgcccagggtggaatgccgtggtgcaatctcggctcactacaaccccttcctccsaggttcaagcagtccttccactgcagctttctgagtagctgggactacaggtgcacaccaccatgcccaactactttttaatttttaattttagtttattttatttactactttttttggagacagggtcttgctctgtcacccaggctagagtgcagtggcgtgatcttggcttactgcaacctcggcctccccggttcaagtgatcctcctgcctcagtctcccaagtagctgggattacagggcaccaccatgccctgctaatttttgtatttttagtagagacagggtttcaccatgttggccaggctggtctcgaactcctgacctcaggtgatccaccaccctggcctcccaaagtgctgggtttacaggcgtgagccactgcmcctggcccttattttttttttttaattttctgtagagataggatttcaccatattgcccaggctggtcttgaactcctgggctcaagcgatacgcccatctcagcctcccaaagtgctgggattacaggcctgagccactgtggcttttgttttttcgtttgtttttttgttttgttttgtttttgtttttgtttttgtttttccatttaaccctgagtggacacagcacatgtttcagagagcacggggttgcgggtaaggtcacagatcaacaggatcccaaggcagaagaatttttcttagtacagaacaaaatgaaaagtctcccatgtctacttctttctacatagacacggcaaccatccgatttctcaatcttttccccacctttcccctctttctattccacaaaaccgccattgtcatcgtggcccgttctcaatgagctgttgggtacacctcccagacggggtggtggctgggcagaggggctcctcacttcccagtaggggcccctcacctcccagacggggcggctggccaggtggggggctgacccccccacctccctcccggacgggacggctggccgggcagaggggctcctcacttcccagtaggggcccctcacctcccggacggggcggctggccgggcggggggctgacccccccacctccctcccggacggggcggctggccgggcggggggctgaccccccccacctccctcccggacggggcggctggcctggcgggggctgacccccacctccctcctggacggggtggctgccgggtggagacgctcctcacttcccagacggggtggctgccgggcggaggggctcctcacttctcagacggggcggctgccgggcggcagggctcctcacttctcagacggggcggccgggcagaggtgctcctcacatcccagacggggcggcggggcagaggcgctccccacatctcaggcgatgggcggccaggcagagacgctcctcacttcctagatgggatggcggccgggaagaggcgctcctcacctcctagatgggattgcggccgggcagagacgctcctcacttcccagacggggtggcggctgggcagaggctgcaatctcggcactttgggaggccaaggcaggcggctgggaggtgkaggttgtagcgagccgagatcacgccactgcactccagcctgggcaccattgagcactgagtgaacgagactccgtctgcaatcccggcacctcgggaggccgaggctggcggatcactcgtggttaggagctggagaccaacccggccaacacagcgaaaccccgtctccatcaaaaaaatacgaaaaccagtcaggtgtggcggcaattgcaggcactcggcaggctgaggcaggagaatcaggcagggaggttgcagtgagccgagatggcagtagtacagtccagctttggctcggcatcagagggagaccgtggaaagagagggagagggagaccgtggggagagggagggggagggggagggggctcgtttgtttttttgtttttgtttttttttcatttaaagagatggggtttgcagtgttgcccaggctggccttgagctcttgggttcccagggcttctagtcttgctttgatatggattgttagtcacatataaaatgttatgctattattggggaaaaaaagagggatattacataatggttaagtgattcaaaatacttaaagcaaaaactgatggaactgaaggaaaaatagacaaatccttaattaatgtaatcagccctctctccatagtcaaaaaacagaaaacaaaacaaaaaaaaaccagtagatagaaaatctactgaaaggaggtagaagaagtgaacaacactgtcacccagcttgatttaattgacacttataagaacactccacagcaccttcaaaatacacacttctttttaggtgcacatggtgtattcaccaagatgagccatattttgggccataaaactcagcaaattaaaaaaaagtagaaattctctgaccaaacagaattaaagaagaaagcagtaacagaaagatatctagataatccccatatattagaaattaaatgcatttttaaatagcccatagtcaaaaagtcgtcagggaaattagaaaacatcttgaatagaatggaaacaaacagacaacatgtcaaaagatatgatccagccraagtgctattgaggaaattaaagcagttagtgatttaaaaatctcagatctcccatataaacttccacattaagaaaatagaaaaagaagagcaaattataatgaaagtaatcagaaggaaggaaatagacaaaagcacaactatgaagaagcagaaaattaaaatagaaaacattaaaagaaagctggttctttgagaagatcaataaatttaatgaactttagccagactaatcaggaaaagagaagacacattacaaattgcagaattgaggaagaagggacatcactactgatcctacagatgctaaaaaatagataatagaatattaacgattttatgccagtaaacttttaagtttaatggacagatttcttgaaagctcactcaacaaaaaataggcaacctggccrggcgtggtagctcacatctgtaatcccagcacttttgggaggccgaagcaggtggatcacctgaggtcagcagttcaagaccagyctggccaacatggtgaaaccccagctctactaaaaaaaatacaaaaattagcygggcgtggtggtatgcacttgtagtcccagctactcaggaagctgaggcaggaagaccacttgaatctgggaggtgtgagtttgcagtgagatcaccccactgcactccagcctgggtgacagagtgagactctgtctcaaaaaaaaaaaaaaaacctgagtaatctyatctctattcaaaaaaacctgagtaatcttatctctattcaaagaaattgaatttgtggttcaaacttttttcacaaaacttaagatctaggtctattccgtggtaaattcatccaaacatttaagggagaagtaatgtaaattctgtgcaaattcttccrggaaataggagagaacatattccacctcatttaattaatgaggtcagcattaccctgataccaaaccagacccagaccattgcaagaaaactgcatagcaatatccctgatgaatatagagtctgctgtgttaaaggcagactcagaaggctatatactgaatgataaccatttttgtatgatgtttcgtagaaagtaaaaccatagggacagaaattagatcagtagttgcttggaaatgggaggagagaattgactatcagtgagcacaagggaacttttagagtgatagaaataccttgattgtggggagattacacaaccatgtaagtttttttaaacttctagaactgttcacctacagggtaagaattttactgtttgttattttatctcggtgaacctgtctttaaaaacaataccactttctcctgcttcagagtcttgctatggagatacacttcaattcctacttcagtggaagagtcgggaaagaaagagaaaggaaagagcatctcactgctgtgcttggagggtttacagaaaatattcagtgctgtgcaacagttctatcagcccaagattcagcagtttctcagagctctgggtaagcattgcagtatcaataaataggcttgatttaggtttctccttagctcaaccccttaattccatttgttaacctaccagaagacacttgagaacagtcctaatgttgctaaggagtgacatctagtggattcaggattggtacctactggattacattcaaccacaaagagtggctggaaaatggaatatagtattaagaaatcacaaaattttagaaatttaagtctgcctttagacttttttttggctttcaaaaattttagctattaaaaggccaaaaagtatgagtttatatcaaagaagacaagagtttcttttccattcctagatgtcacagataaggaaggagaagagagagaagatgcagatgtcagtgtcactcagagaacagcattccagatccggcaatttcaggtgagaagccttgcaaagctgctgtactggcctgagaggctttgcaaaggaactgttagcaggggcagctggtaagaatgggcagacagtgaccaagtaggagaagaattttttctgggtcatacaggcaacaggacatagctctcagaatggaagataatgtatttaaaaggaccctagtgaggataggtatttagccaccccaacctgcaatactcattacttctaaggaccactgtttgagttgatgtaaacagaaaggagtcttcaaggcatagagtctgtgtttttgttttctgagtctgtggtataatttggcttggtctgacagacwacgtaaacactggacaataaagtttgttagtttctaaccaatagttgtcaaaatatcaggatgttctatcacaggagttttttatttaacaagtaattctgaagttcctaccatgtgccagaaacagttctaggtgctggggatgtagcagggaacaaaagagacaaaatattcctatccttatggagcttacattatagtagaaagacactgacaaataatcaaatacatagttatttcaggtaacagggaaggtatataagcattgctgggtttggtgccttktctaagcctgagatcaatggataggctccagggagctgtgagccaccagaaattgggtacatagttcattatctacattttgcatggggttggaacggaaagagtcagttttcaggagcattctcagagaggtttatggtcaaaaacagcttaggaaactactgctcaattcaggtgtattttcagattttatcctcttagaattttggtagctttgaattctttctgtcctagtcttaggagtctctgactagatgcctcttcttcctgataggaasgtgtctgctaacattgcttgctgtgtgtgccttcctttctcagaggtccttgttgaatttacttagcagtcaagaggaagattttaatagcaaagaagccctcctgctagtcacggttcttaccagtttgtccaagttactggagccctcctctcctcaggtactagtaccgctmacttaatcccatttagcattcctcagaaggcaaggattattgcatcataaaagtgtatatctaaatgtcctcttgaaattgagcttattttacataatgtgtttaattatacacctgagttaatataagacctataagatgtattctttcctgtgtaatgcgtctaccacarcatacttacatgcagccatacagggcaagaacatactgcttttgttttgtttgttcagggtagagtgaaacaccacagaaagaatcctgtgttgatctttggtgccttcaaccttcttaaacctgtgttctttgccactcttggtgtttacttcttttctaagaagaaaatttgttaattatgaagaaggcagttgacattcagcagttgactttctcagcacagttacctggtactgactttggaggaaattcaaccaaagatgattaattcagaaagtgtaactatagtcccaaagcagaaacacctctgcagagataggttgtatgtatgtttgtgtaagtgtgcacacgtagatgtagagctgtgtacccacatgagcgttcacacacagaagaataagagaaggaccacttgttgggggtctgtaccattcaggagtaattttcctgtaggatgatagagtaccttcaggagcccaggactgtgtgctcctaccacatctacttcctgggcttgagaaagacaatgaagccctgcggtatactcctctttatgtgagcccttgcctcagaagactgtagcctgggagtatgaaggcgtttgggcactagaaagcagagctgcttcctgtcgtcctacttccaggtttgcccaaagaaagtccctttggttacttcatcccagttccaaacagctcacccccactttgctctcatcatcgttctttcatactgctgtttttgctgcaaagaggaaaggactgagaaagaaatagctaattggggcagggggaaatttgagagaaaataaatggatttaggaaggctaaaatgttcaggaaaatttaaaaatttttcttttttaaacttttaaacttttagatttttaaacgttttaccacctaccccttctcccttaacttcaggtagtctctttaaaaaaaaattttttttttttttgagacagagtctcgctctgtctcccaggctggagtgtagtggcgccatctcagctcactgcaggcgccgccttccgggttcacgccattctcctgcctcagcctcccaagtagctgggactacaggcgcctgccacaacacccggctaattttttgtatttttaatagagacggggtttcaccgtgttagccaggatgatctcgatctcctgacctcgtgattcacccgcctcggcctcccaaagtgctgggattacaggtgtgagccaccgcgcctggccaaaaatttttaawtttaattttgaatgggtaataaagtcctatgatttgaaaaccagagattatcaagagatttatggtaaatggtgtcccccacccatgtcctccatctgttcagttcctcctctccccaaataagtaaacacctttagttttttgtgtccttcaaccttctttattcccttccaagtaaatatagagttttattcccaatcctacccctcttcacacaaaaacttgttctgcatcctgcttatttcattgagcacggtattctgaagatcttttaatatcagtttgtagagagctttcagttagcctcttaatttaccttttcctcaacagatcaaaactgcatttttgttagtcatttacacttaagtataacggcatttcggtgcctttgtagctgaaagaactgctgaagcagaaagttgactgtgtgtctggtgatgcagatgcttgctatctgaagaccttaagtctccttcacttagctaagaaaatgctgtctggtttcttgcctcttttatttctcttttttctgcccttctctcttctaacctcctttgttcttttggcttctaaatgctaattctactgttcttatagctaggttttctctttcccacacctttctgataacctaatatcctcaagtggagagtctgggggcatgggaaagaaaagagggcgctttagccctagaccactatggtagaagcagaggaagttcaggtgtaaggaccctaaaacttttggacctcagtaaggacayagacattgagaattaaattatatattattctcataattcttagaattttggacttatttttatgcccttcatcatatattaccacttgagatctaaggacatgttttggcagctgatttgcttagatatggaaaggtctagaactcttctrttctgacaacacctaggtctatcyctggcatgtttctttaatatctgaatgatctctaatttagtttgtgcagatgttatcctggacatcaaagatttgcaaggaaaacagccggggtaagtttactgccatgttttcctaaaggctttatataaaatcactatcctccagtggcatttggaaaagaaaaggtattccccattcattacacattcaccagagtggccaaaatgaaacagacacctaataccaagtcgaattgttggcaagaatgtagagtagttggacctttcattcactgggggtggaggtagaaattggtataaccactatggaaaactgttcagcaatatctactaaaattaaacatatgcctatgactcaacaattcgaatcacaacagaaaaatgtggaagaattctcttagcagcactattttagtaggtaaaacaaacctaagtgttcatcagcagtagaaaggataaaagaattatgatatattcacacagtggaatcctatacagcaaataagcatgaacaaactacatgtacacacaacttggagaggatctcacaaatgtactgtaaaacaaaagaagccagacacaagaaagggtacttactgtagaattccgtttagatgaagttcaaaattagacaaaatttatctgtgatgttagaagtcaggatagcagtttccttggyggggcaagttaggagggagtccctagaatactcrtaatgtacttgatctggatgctagttacacagtaatcttaactaatgatgggaaatgtctgccttctttgggcatgtggataaagaggcatcattgcagactagctgcttggctgtagtatgtgtaacactgggatgttgtgcctgagacacgacaagctacctcctgttctggttaggcactccaccccacacaccctgtacacatacctgagggacctgactgggttataacttaacttttttttttttttttgagacagagtttcactcttgttgcccaggcaggaatgcaatggcacggtcttggctgaccgcagcctccgcctcctgggttcaagcaattctcgtgcctcagcctcccaagtagctgggattacaggcatgcgccaccatgcccggctaattttatatttttagtagagacggggtttctccatgttggtgaggctggtcttgaattcctgacctcaggtgatccacccgccktggcctcccaaagtgctgggattacaggcgtgagccactgcacttggccacaacttaccttttaatttgcttttcttcctattcctagaggatgccttgttttgcaagagcttgatgaacttgctcttcagcytgcatgtttcgtataagagtcctgtcattctgctgcgtgacttgtcccaggatatccacgggcatctgggagatatagaccaggtactataatgagccttcagtacaataccctgtgtggggatgggggtcaagggaacaaccttactgtcattaggtctcacctctcttcttttccccaggatgtagaggtggagaaaacaaaccactttgcaatagtgaatttgagaacggctgcccccactgtctgtgtaagtgttgtacctgagccatggggaatagctttgtcattctttccattctactccatgtgaagtgacttgtgtcctatagcggcttgtgtsctgaggcctgtaacccacctgtaggtggccaggtgaccacagttattatattacccccacagctgtgtgtagtgaatcacaccaggcactcttttctttcagttacttgttctgagtcaggccgagaaggttctagaagaagtggactggctaatcaccaagcttaagggacaagtgagccaagaaaccttatcaggtaagataagttcaactgggattccaggaattgacatgagcaaggtcaaaattcatattgggtcggtgcataaaaatggagcccctgagctaaatttcttatttgcctttaagctagattttttcctatgtgatgaaagaagtagaagatcatatgtcttatcacagcacgattaattcactctgcatattgaatgttcrtttttccataaagactttctagttagtagtaatcaatttctaaatctcctttactcttaattagaaaacgaagttgggtttgaatgtgccaattttatttccctttagaagaggcctcttctcaggcaaccctaccaaatcagcctgttgagaaagctatcatcatgcaactgggaactctgcttacatttttccacgagctggtgcagacagctctgccatcaggcagctgtgtggacaccttgttaaaggacttgkgcaaaatgtacaccacacttacagcccttgtcagatatgtgagtatttgagacaagcagattcgccccaccattctaccccagtgagccaggagatgaggatggggcagcagcccactgctgcagaatgcccctaaacaagagagcatttgcctccatcttggcaggtcatggtttcattttagtttggtcagtaggtggcaggcatctccacaggccagggaaaaacagtttataattctaatctgcttttgggcctgtcacggtggttcatgcctgtaatcccagcactttggtaggctgagacgggcggatcacctgaggtcaggagttcgagaccagcctggccaacatggtgaaaccccgtctctactaaaaatacaaaaagtagctgggcgtggtggtgggcacctgtaatcccagctactcaggaggctgaggcaggagaatcgcttgaacccaggaggcggaggttgcagtgagctgagattgtgccactgtactccagcgttggcaatagagtgagactccatctcaaaaattaaaaaaataaagtaaaaatctgcttttggaggcccttaattctttggcatgtatgtggcacctgattgagaatgaatgcctcttttaaataccttctaaggtttaatctaaactataactatcctagaattaaatctgggcccatratgcatagaaattataccatttctaaccagtctggacacttaaagagatgtttattccttttttcattcctttaacatgtaggtgttaaatgccttatagatcaaatactaaggtggggaagaaaattattttttataaaaatacaaggcataccctgcccttactgtttatgttcctagcaatgatccatattaaatacttagaaaggcacagataatccaagaaagatgtggaccaccccgcatcacagcagtgtggctctctcagaatgtgtagctctagctacatgtggctaagctgctgtagtggaaatactgagagcctcttctctttattggcatctttaaaaggaaaaacagcaaagttgttggttttttacatgcagggactaccagcctgaggaatttttaaagaaatgagcaaatcagaaacaaacccttcattacttattgtctgggaagcttaggagctttggaggagaggaataaggaagcttgtgtcttggcttctctgtgaattttgtttttcctcttcagtcagaatgatgagtcacactccataggctcactgcagcmgtcacttgtagtttcataggacagtctactaaatctaggaatctttttttattagtatctccaggtgtgtcagagctccggaggaattccaaaaaatatggaaaagctggtgagttgagaatgcctttcctaggaatgggggaagcacttttactgctggttacattggtttccttctcccttgttgtgcaggtgaagctgtctggttctcatctgacccccctgtgttattctttcatttcttacgtacaggtaagagattcagaggcartacccaataggtcttcaagaaaggatttcttacatgcccaggggactattgatcacctgaactgagcatatataaacttttttccctgcttaccacaagctggaggcacccatcagagaccaagccaaggcttgagggctttgcagcaaggacatctttatgtaaagaaaactgtttcacttaatttggagaaaggaagcatatatgtttgcatttggagcaaggaaggaacaagcatgctcaggctcaaggacttggtttattcctgggtgactgaaagtccatgccatgaggcatcctctgggaatgtgagcagagtagcagcaagcacatgaagaagggttgtgatgagacggcagtgcagtgagggcactttcagggaagtggaaggacgtggctttgtaagtgtcatttggtcctaaataccatcagattcctgcagtacttgaatctcctttactgtttgcttaaaccagttttttaacctcaccactattgacatgttgcgctagatarttctttgttgtgggacctgttctgtgcattttgggatgttgagtagcatccctggcctccacctaccagatgccagtagcagccccctagttttaacagccaaaaatgtctccagaaattgccagttgtccttaagggacaraatcacccctggttggaaagaggaagaaacgagagatctactgtctcctaaggccacttagtcatgcagtaaatgtatcacagggctgttactgatctttgaggaatcaaagagaatgggtccactaagtgtcaatctcagccaagattctagaaccaattattaaagcaatggatcgtgaccactttggtagtgatgcttcacttgttttctgcctctgcatcacttacaggcacaatatcattctatcagtaacttgcctcattatgtgtattcagggtgcctcttcccctccctttaagaatcagcaatcagctgggcacagtggctcatgcctgtaattgcagcactttgggaggccgaggcgggtggatcacctgaggtcaggacttcaagaccagcctggccaacatggtgaaaccccatctctacaaaaaatacaaaaaattagctgagcatgctggcgggcacctgtaatcccagctacttgggaggctgaggcaggagaatcgcctgaacctggagggcggaggttgcagtgagcaaagatcgcactgttgtgctccagcctagcaacaagagcgaaactccgtctcaaaaaaaaaaaaaaataaagaatcagccatcaagtgggctgtcatctgggtttagctgaaggagttcttagtaatgggctgatagttgagactctctgtcaccttgcctttgtatcagttttgtgatctgggtcaggaatgcatcatccattttctatatccagccatccagccagtagtcaactgtcataaagctattacttctggtcctctccttttatctcacccaaatgcttgcaggaatgctttctcaaacctcatgcttgtaaattttcatgtgggtgccattcgtcaaacaaatctgttgtctatatataggatatatatctgtccattcccatatttgggttttgagtttcctcatctccaagtcttaatgatacctataaagacacatttcacaaaatatgctatatagactgagacagtcctcaaaaaaaaaaggaattcagsgagagatgctcatacygtatatctctcaccttagagattcgtggtgtccatttgcatattaaaggtgctgagaccagtcatggtggttaatggaggctgaggtaagaagatcacttgaggccaggagttcaagaccagcctgggcaacatagtgagaccccgtctctacaaaaaatttaaaatttaagccaggtgtttgcctatagtcccagttacttgggaggctgaggcaggaagatcacttgagcctaggacttgaaggctgcagtgagccatgatcatgccactgtactccaaggcaacagcgtgagaccctgtctcaagaaaaataaaaacagtgctgagagttccaacagtatgttcattagtagttttcagacctattcaagaacatttttaaaaaaataacaaatgttactatttggcagaataatgttccatagagtacagtttgggaaatactgctgttaaatgctatttactacccttgttatgattcaaaagtcacattgtctaataattttattagaacaggtaatgcttagagaacctctaccttgtgtctgatgtgttaagctcttttcatacatcatctcattcatcctagctataggttatgattagtagttatccccatatgcatgatgagaaaggttaatcagaatgcccaagaacagaccatgagtaaaaggcagatctgagacttgaacccagctagttagactcgatagcaggaattggcacactttttctgtaaagggccagatagtaaatgtgggtcatacagtctctatcacacctactcaactctactattagaacataaaagcagccatagayaacttacaaataaacgagcatggctatgttccaatgaaattttcttatcaaaaacaggcagtgggccagatttatactatgggctatagtcagtcaaccattgctctagagtcatacctggtacttgttgacatgtaaaatgttggaaggttttgattttcgtgtttctgaccccattttcaagcattttcttctgggaatcactactacttcctagactgctattattttccyctcattacacagtaatcagtttcatttcctccctaggcattttcctcctcctccatccatatttgacttaaagccttactgacaagtcagctgatctgcaggcaaacattttacatttttctgtttttgtgagatgtatttaatgagtgccccctgggcaagagcccatgcatggttccattaactccagctcttaactagaaatggggattgcattttccacacctctcagtgaactgttaattctcttgtagccccctcttcatttccccagttccttagatctcaatgggaagaaagcaacgaaaaccattgctgcaactcttagcatcctgcccagaactgtatacctttaaaagatgcttctcaagggtcggacatggtggctcatgcctgtaatcccagcactttgggaggccgaggtgggagaatcacaaggtctggagtttgagaccagcctggccaacatggtgaaatcccrtctcaactaaagatacaaaaaatagcagggcacggtggctcacacctgtaatctcagcattttgggaggctgaggcaggcggatcacaaggtcaggagttcgaaactagcccggccaacatggtgaaaccccatttctactaaaaaaaaatacaaaaattagctgggcatggtggcaggcgcctgtaatcccagctactcgggaggctgaggcaggagaattgcttgaacccgggaggtggaggttgcagtgagatgagatcacaccactgcactccagcctgggcaacagagcatgactctgtctcaaaaaaaaaaattagccgggcatggtagtgcgtgcctgtaatcccagctactcgggaagctgaggcaggagaatcgcttgaacctgggaggcagaggttgcagtgagctgagatcgcaccattgtactccagcctgggcgacagagtgaaactccacctcaaaaaaagatgcttctcttctggctctaattttagtcctgcccgcccggatcagttggaatgggcagggaacagggttgatctaaggagttccaacagggccccatcttggacacaacctctgggaagatggttcacttcccacttggtcagtgaggtcgatccgtgactgcttccttgccctcttctgctgccttcaccctcttccatsctctaccctgccttccagggccaaaaacagattactgcataccagcccctctggaatgtctgcagttccttattttccagaacgtggcatgtggaacaagtctcctgtttctctcatggctccagttgcagagcctctctgtattttcaggtctgtttctttattctgttgccctcgtggagcatggtatgttcccttcctaagaaggtttagaactccccttgaggtaaaaagctgcctacatttctgtaccgtaccttacatttgggtggtttttctccccagtctctcctgactcaagtcttgattttcttttgctttatcagaatcttacactttttggttccttttattagttattcatccctctccaggagctctttattacccaataatttacaacacagggaagtgttctgtgacccttttaacccttcttgagcatgataacccattgcacataaaatatatctggttttggctttgctgagtaacgaaaataaaatatatctggtgattgcctgtaagtgggaagactgcagggccctgcagcagcctcctcagcttcctctcctttatgggatccttctagcccactggctaaaatagaaatagaaatgaatattcctgctaccaccttgacagtccccattttaaccattctttagtacctcaccagccccttggctgacccactgcagtaatagtcctgccttcaacttccatgtgccagctctaagaacaacagattgtaaacctctcaacaactaaaaaagaaaaaatatctgaggattacaaagcatccattttttccctatcttctaacatctgttgcacagatagtcctgtttactccagacttggtcctcataccctgtgtaattaccttctaagaaaattgccactagttggtgggcatggtggcttaggcctgtaatcccagcactttgggaggctgaggccggcagatcacctgaggccaggagttcgagaccagcctggccaacatggcaaaacaccgtctctactaaaaatacaaaaattagctgagtgtggtggcacgtgcctgtagtcccagctactckggaggctgaggcacaagaatcacttaactcggggcgcagaggttacagtgggtcgacatcacgccactgcacaccagcctgggtgacagcaaagctctgtcttaaaaaaaaaaaaaaaaaattagcactagcatgctagctccacagaaaaatcatcaggaataagagaatgtgtttctatttctttagaataagagtaagagcctgaactatacgggagagaaaaaggagaaacctgctgccgttgccacagccatggtaagctgctgacactgaccgttaaaatatgcttgttggtgaacccgaaaacatgaagcggaagaagccagtgacaaaaagaccacgtgttgtatgattccattttcatgaagtgcccagaataaatcatctaaaaaggcaaactagattagtggtagcgtagagctaggtgggttggaagatggggagactggggtgacagctaaaaacggtatggaatttcttttgggggtgatgaaaatgttttagaattgactgtgatgatggttgcacaactctgcaaatactgaaaaaaaagtacattgtgagtgaattgtatggtatatgaattacagctctatcaagctgttagaaaaaattgtgtgtattatatacatggctgcttctcaactcagggattttatgatcagatggagcatcttatttttcctctgaaccaaaaacatgttttattcacgaagcaccagaaaatcttgagttgaaatggaaatagtaaaataacttacgatactcaattgggagaaattatttttaggtaaagttggtgaatgcaaaaggtgctccctaaaagatgtgtaagagtcagcgggggtacaggaaaggaggcacttagtacattgctggcaaaggtgaaaattagtacagcctctccagaggcttagcaatgactactgaatcccattctgatgtagcagtttcacttttaggatatacaggcctgtgtacaggatggtcctcacaacattatttataaaagtgaaatattagaaacaaagatatccattaatagaggactggctaaataggttataatatatttatactggagagatatgaaaaaaataaacatctaaatgttcagctctctggaattatctccaagataatgttaaaaaaaatttgtacagtatcctcatgggttaaaaatacacacacacacacacacacacacacacgtaggacctacaaattacaattcacgttagggggaaagatatataatcacacacacacacacacacacacacacacaaatgtaggacctacaaattacagttcacgttagggggaaagatatataatcacagacacacacacacacacacaaatgtaggacctacaaattacaattcacgttagggggaaagacacacatatacacacacacaaatgtaggacctacaaattacaattcacgttaggaggaaagacacacacacaaaaacgtaggaccacacacaaaaatgtaggacctttcgttagggggaaagacacacacacacacacgtagaacctacaaattacaattcacgttagggggaaagatatataatcccagcagtgaaaattcatacccagaccagaacaaggaaatagagctagggccaaaataggcttaagaatttcaagtcagaaaagcaactaaatttctacaagtgatcctgccctcctcagccattttctagataacaacaaatactggaattataaatgaaatggatcagtgcaattatctctactggcatttgggtccttccagattgaactgccaaaaattktagattactggtatacaagtacaactgcatttgattgggagacagactagttttcccctaaagccatacagttttgtaagtgacagcttcagaggaaaacttcaaaaaccattgaacctgaaatttaagtcttatgttctttgcccttaggccagagttcttcgggaaaccaagccaatccctaacctcatctttgccatagaacagtatgaaaaatttctcatccacctttctaagaagtccaaggtaaacattctcttwttatgtgctaccrttcccatttaccttcttgacagatctggcaaactgaagcagcacaactacaatggaggaaaagagactctgggccatttgtgtgtttgccatcccccctctcccccccccccytttttttttttgagactgtgtctcattctgtcacccaggctggagtgcacattcaagtgatcctctggcctcagcctccagagtagctgggactacagtcatatgccatcataccccactagttttttgggtttgtttttgtagagatggggtctcactatgctgcccaggctggtctcaaactcctggcctgaagtgatccttccaccttggcctcccaaagtgctgggattacaggcatgagccaccacactcagcctctttgctgttcttgatctgatgacctgaaccccagcatacagaaggaagtgggtgcgtgcttgctttaggtagaaatggaaaggtttctcagaggtgaactaaaaatggcttaagctgttctggcaggacctatgagtagggagatgtcccatgcttacaatcttgtcataggtgaacctgatgcagcacatgaagctcagyacctcacgagacttcaagatcaaaggaaacatcctagacatggttcttcgagaggatggygaagatgaaaatgaagaggtcagtgctggcttctgtctggagcccagccactcttcctagctggttagcagcctatctgggagcagtcacagattagtggaagggcaacagaatgggaaagggctaaaaggtgatcaggcaaagatgagagcaaaggactctcagaagggttgtaaactttggaccacacaaaatcctatgaagttgccccgacttgtttgataaacacttccaggaagcaggtggtaacaaaacaatgtcctgctgtgggtcctcttcctgttaatcttttaaactactggatgatgaccagctatagcagtctggctcagaaactagtttacctctcatgtcatgccctcattcaaaggccactcattagtttgggttaaggcttcttccttcaattcatgccaatgtcttgtccttttcccttgtggtttgttcctctccctttactcttagcaagtgacagtaccgcatccccatccctgcaccacctttgaaacagaacccaatgtttccttacttctagcacctaaaattttcatcttaggtttgtctaataagtagcaaatcagtagcccactcccatttcaaaactggaagtttacatacaagtgccctggatttcagaattttgaacatgcattcttcagatgatcacactccaggctctaatgtacctggccccatccactctctttacccacttggcagctgcactcaggagagtcatgtagcattttgatgtcaatggcttcttctcttgtcrttttgtcccataagtatcctcagtatagcaaaagtcctaaaaggaggtgccactgtcttattactctacactttggaggactccttcctcttcttcaacaacataattacctcctgtgagtgggaaagtggggaaagcatgactaacaaaggctttgatgagaagatagagtcttttttttccttctttttatttccactgccttggagcaggtttatcacgttagagcattaattctttccccttctagggcactgcatcagagcatgggggacagaacaaagaaccagccaagaagaaaagraaaaaataaatgaaatgcctgagttaatgtgaactttggggcttctgcttcatttttacccaacaagcaacaatgccccttgtcctgtagtccacaccgatgttggcatcttggttctgaacccactgaattcaactgcaccttcagttagaaggaatcttcttggcaggtcctgctactgaaaaatggctggccttaggcaagcccttttgcaaaaagcacagctgaaagcctgagtttgggagcctgcaccaccccgatgaagctccaygggagcaaatacagagcctccaggcagtgctatggtccaggmtggcttcgtttttccaargagcctttggtgagttcaattatctggtaaatatccagcgcttcacctgaaagayagtgsaaattggttaggatgccacctcaagaactgtaactgagagctcagaagtgagcaaagkagcttaatgctaaggtcaaaaggagartgaaaggttgagaacaattgccacgaacggtaatgttacatgttaggagggtctgttttctttttatataagtgtgtcttagatatattttaaatagaaaataagctttctgatttacttgtttggtatttaaagcacagtttgtttttctgtcacctatagagtgcaagaatgcactctatagaataaatymtctttaaacatttcttctgtggttgaagtasgggacaggtacaggtagaatatttgaagctctgctgccttcatttytgaaacatcatatcacattcactctggacacagggcaccttataaactgaaattagcctagaatatagcctgagtcaagagtggattctctggggccccargtttcctgttctccaagacccactttctagtccacctcagatcctatgtgtaatgaggaacaaatgtgttgtgctcaccctggggaatcccgtatctcctttccatcccagttgggttggaaggggttttacaatccatggtcacttccttcctgaggcaccggtcaatatcgactgcactgaaaaaggcgactgactggggcaagtcattcagacccagcttgtaggcaaacatgcacctgaaagagacccaatctcctctcacagtcatgcccctcctgtgaacagatgcatcactcctggagcaatgaccccacaccccttagagcagggcttcccctggaccaacaccccatctgttcacttagctaagtcaagaaaggtgaaggtccagcactgttttccatccagcagcctaacctcccactgagatactgaaatgcaattatggactcaacatacttttttttttttttcccagtttggtacactttattaattaatatacgaaatcacttccaattgggccagagtttgaagcataaatgaggacttttagctttgttaagcataacctcccggagatgatgattaagagggcaatgggaacaatgttgaatattgtaaacatctgttatttacccaataatcaggatagatcatggttcccaaactggttctgagtggcagatcaacatggaacggtaatatttaattcatccatatgaactaggaattttactacaagaaaatacaactcaatatataaaatatataagatatttttaaaaatcacatttgagtgtccccattaacagtgttttctgttagcagtcaaataacaaacttttggcacttacttaagaaagaaaacatttatgggagaaagaaaaacaaacatctcaattttctatgaaatgagaaaaggcttctgtcatttgattttccaaatagaaaagcgtgagtaccacccttcggaacaattcccctaacctcactgcttccctcaatgatcagtcttggtatttcacattttcaaacccaataactctttttttacgaattgaggctagtctttttaggacttctacaactttttaaaaattagaaataaataaataagctgaaacattcacttctagggggatgaaaagtcaaaactgaccagtctggcccaaggaacgctcacccaaagccccacataggagcacatggccaggctagaggccatgggccccgcatacctggtcaagaggttggtgatctgcaaggccagggcagcgcggtagcggtcctcctcccgcaccaggtagcgaacctcgtcatggatgctgatgcagaagcgcccatctatggcaaactcttcaaacagccacttcatggccacaagcatgaggtgtaagtagtcaacagcagagctctgtaccacccaattcacacggctggtcataaactgggaagggaaggtgggcagaggtgaaaggggctatgctacataccaattaactccagggtagaagccccaagagaagcttcactctggccctacctacaaacattggtaaggtccacagggagctctgccctgccctccctggggcccctctgcccatgctccaaaggtagcaagatacctcttcctggacagccgagggctccagggctcggctgatgcagcagcccagcaccggggtacgtggtatgtcagacgtagcaatgctctcaagcttattgaacatttctgactctgtgccccccttccatgcccgttcagcaaccacctcccacttcttccactgtgacctaagggaccagaaacagagggcagactttgtctttcagcatctcaaagctaaaaaacaaagcatccaagctcttctggggcaagcccagacccctccctccatccttaacacaaagaaggttcttacttccttgcagtttctctctggaccttgcgcagatcctgcagggaaatccagccaccctcagtcctgtccactgggaggttcaactccctcaccagccactcgccctcatccgacagccgatacctgggggcagtgttatcaccatcattccacgggagtgcttcctgtgccacgctagtgccttggcaaggaatgttcacatatcacttcaacttttaaaaacactgacatcatgccagtcccctaaaggcttttattcagaggaagaaacggctcagagaggctaagtgccttgcctaggatcatggagctagaaagagatgcagcccaggcttttgtagccccaaagcctgggccaccccatggtagcccaataaaggacaaagactccagcacaggaggcaccactattcctactgtcctgtttctttagacactgaattgcccaatgaccaacacgggccttttattcaggaggcagcaagggccatcactctagatttggggggataggggtaagaataggctactccctgaaggggagggggcatttgttgaagcagaaaacacaacagccaggcctggcttacccctctcaactgccacaaccctagacaactcccagcttccatctaacctgcagacctcacaaggcttgtcgcctgaaggctccagagacacgtcactcgcataaatggcttccccaccacctgcacccacagtccaaactcctgtgacactttcaaaggtgtccacaactaaagccccaccacctttctcgcctccaccagcacacgctgctcacggtatgagccttacccgacctcactttatccactggacgatactcagctccccttccctgcatttatagtcatcaaccactatatcatttatcacatacttaacttttagttgttgacgagaaagtgaagtttccacaatgagccagctaattaaatgtggacagtgtactgtacctcaggaagttgtacctctcttccctcaatgtttttggaaccctgcagagagtctgctaaggccctgagcacacagtatgcagtacgatcagaggaaacaaattggagagctaggctaagtaacctggaggcctggtaatgctttctccagtatcaacatcagcctacatgctccagtttgccacagcgccctcctgtcaactcctgtcttccacccactccatttgctctcattccctgtaggcatctgagtttgcaacccctgtattattgattatgcagcataatcagaattgtcaagatgctaccacttggtaacagtataccaaaagtatagctttactcccatgaggaaaaactgtttaaggctgactataaagcaaccaaatgtcacaataggacaaatcatcctggaaccaggttacacaggtgtggaaggagaggggctaggtgagagttcaagtaatgggcaggagatagaacagatgggagtactaaaggacagtaaagcaggcctcgggtcctgggtgttaaagtggatgggagagggaccctcaccagcggaggcccttggtggcagcgtacatctgctgggccttctcagctgcctcctgctgtgtgagccggtggttaaactgcattagtaagcgctcagcaaagggctgcccagcaccatagatgcggccgtagttgaagattttggcatgctcacggctgatgcccacagtagtggctgtcttactgtgtagatcagtgcccctgctcttcctgccctgcagtgtcatccacccaaaggctgtgcagcctggaagacaagcaggagtgagaaaagcagctcaggaacattctgcccaatgttcatcagaactgtcaatatgctgaggggctgggctgccccaaccccggctcctgctcaccatgcatgccggcaaagtgggcgtctccaagcacagctgcaatccacagctcttgggagtccacatcagcacccacaagggtgtagccaggtggggcctgcaccatggctttcaactcactgcctactcggtcaggctgtgggaagagtgagatacccaaatgagactcttcctaccccattcctggagccagagttgactgagaaagagctagagcctttcctgaggggatggctttagagaatgccagacagcactgctgaaattccacagttccagagatggccacctatcagcaattggtgtgacaggtaaagaatctactctatgcctagcgctatgccagacccctcacctacatggtcctatctaaattccatgagagctgtagctattacgcctgtcactgtctggccaggagcaggtgcccagaacatatttactgaaggagtggacagaaatcatgaagccagatttgactagagtcctgcctgacccagatcacagggtccttttcatgatcctcactaaatacctaaaggccctcagagcccagtttctacagacctgggagaggaagagcaggggccagaggtacagaggtcacatacccgggcattgctggcggtgagccatgtgggctccacagcccggcgagtgatggtgccggcagtcaccacttggggcaggatggccccatagaggccttcctcatcatagtcggggtgcctggtggggtgcaggggaaggaaatgggtcttagcagggtgctttggccttaggacctaccacctcacctcagttctcctatccctacaaccactcagcagaccatacctgatcacagcacggggcagagctgacctgggcagccacaccaccatctgggagctgtggggacagacaacgtgaggctcagcacagccatgggaagcagaatctatcccacatcccaccatggccctcacctgcccacctccaggactgctatactccattacccagcctcactaactggactcaaggtgagccctggctcagccaagaactggggccctatgatacaccaatcaagagcataaaccatctgggaaccggccaggcctccgagcgagcttccgctcctctccggggggcatccatgaggcgctccttccaccaatgcctcttcctacacacaggcagacttcaccatcccaacacccactctgctcgccagtgtgctgatggccacaaccaccttggaaatggccttcaagatgaatacatttgccattccagactagaagacccagctcccagcccccaacagggcttacaggccaccagctctccatggtcctcagccatagcccacggctccagcagttacaccaagaagttctgttggagctacgaagggctctcatggtcctacagcaccattctttttacattaacagggaaactgaagctagaggggagacctgcccaaggtccatggcaccaggaccaaaagtagccaggcctctagaccatagtcaggctggccctctgtgggaatccagggttagtcaggggtccctgggtgggaagagaggggaaaggcatcccaggactcctcccatggtggcccacctgatacgtttatgggcgttcctccagaaagaaatcattttgttgatttccagagcacggggcccactggcacctcctgggccagcctgcagggtgccatcctccatcttgggcaggaagtccttggcaaaggggcttcccacattacagctattaccatcctggacagagcaaaggaagcaggggctggaggcaggtggcagacccctgggtggggaaccaacgtgagtacctgcactcctcccaacactgagcccagaacctcagcagtctgaggcaaatccctgattgtatcacgcacgcgcgcacgcgcgcacgcacacacacacgtgcacacacatgccccctaagacacacagacacaagcaaacctggctccctgcataataacaaatcggaaaaacctatcacgtaccagatgtcgtaccaaacatacgacgtgccccatgtcatttaattccaccaccatgccccttgccacccgactttcattagaaaaacaaaagctgagagatgacagtatgtgcctgaaatcacactctgtcccactactagt

SEQ ID NO: 95434 - DNA, 30314 bp, Homo sapiens
tgtgctgggctgggcctggctgggatctaataggtcaggaggtggaatgtacaattttgcagctggtgaaacaggccacagggccctggccagggctcagaacccatgggcgtttcagtcattcagaaactgaaggttctgcccttctctctgaaggacacactgccctgatgacatgcttccagaatggatccttctattcaagtgtccgctctttttaatttttaaaccattattttaaaaatttgtttttagtagagatgggattcactgtgttgcccaggctggactcaaactcctcgcctcaagtgatcctcctgctcaacctcccaaactgctgggattacaggtgtgagccaccaagcctggacttcgagtgtccactctttttttttttttaagtttttgagacacagtctcactgtgtcacccaggctgaagtgcagtggtgcaatcttggctcactgcaacctctgcctccaacctctacttcccgggtccaaacgatgctcgtttttttttgtatttttaatagagatggggtttcaccatgctgcccaggctggtctcaaactcccgagctcaggcaaactgcctgcctcggcttcccaaagtgctaggattacagacatgagccaccgtgcctggcccagtgtccactcctattggaacttttttttttagtaatttatagaaatgttactactagaaatcaatatttgtttagtatgtgtaagtatgcaaaaatatatcagagatggcagtttaatttttttgccttttctagtgacatacacatgtagactgagattcttggggttaacatcaacattttcaaaattaaattgtcttattgactcagaacctcatctttgtcttaaactaggagacattaatggagtatcaccttattgcacattgctcaaaaagtttctttcttctgaccaaggaacttatattcaggtatgactttttgtaagctggttgactttcttactggtgcttgttgttttttttaacacattaaactaaatgatatatcaaatgtatattatatattttaatatataaattatatgttgtatagttatatgtagttgtctatatttatattgtatatattatatatacataatatatagtatatattatgaaaagtgacaggagttttcaatttagggcagaaatacatcacatttcctttaaaaatacttacctgtaccatagatacctccagtatcatagattgttgtggagcgaaggtaatattataagtagttgcaaatgacaaactacaaagcattttgcaaatctaagaatctcacctacagcctagctagtctcatctcagtgaaatttagctgaagacttttttcaaaaagttcattcatttgtttagcaaatatttaataagcactcaatcagtgagagctctttccaccacaagtgacagaaaatccagcccaaactagctaaagcaaaaagacgctcttgccattggcaatttcaacattgactggatatttgatgatatgaaggcaatgccgttaatttttttggtggagtgtcctgattggctcaacttagttaataagccttgtccctaactccctgagccaggagccttggtcaggagctaaggagggacaaaatgggatggggacaagaatgacagacgtctgtctctgtgtgccagacatacagatgacagggcacagtttcttcccatcaggaagcttcccaatcctgaaaaaattatttgcatttcaatcaatttctttttgacctgttcgtaaactgtgtggagttgatggaaccaattattccccccgaaatatgaagcatgttttgaaaacagtctatggctatcatcctgaattccacacataggtcacaaggtcacattctcatttttttctttttataagttttatttatttttaattttttttagagatgaaggtcttgctatattgcccaggctagactggaactgctgggctcaagtgatcctcccatctcagcctcctgagtagctgggaatacaggtacatactgccacacccagccagttttaaaaaaaattctttatcttttttagaaatgggggtcttgctgtgttggccaggttggtcttgaactcctgcctcaagctattttcctgccttggcctcccaaagtgctgggattgcaggcattagccaccatgcttcacacttcttacttcacacttcttactggagtctatcttctctcatctgtaaaatgaataataacagcacctactttatggggtcattgaaatgattaaataaaatggtgctctaaagcgttcagcctggttcatttgcaagtggtagctgttgataaaggaagagtggtgatattttctgtctgtggcagaaattgctggagttgggcttggcaaacctgagagaagaccatgaaagtcaccaggaagtaagcacacgagagggactctggaggagcaggctgtcacctgagggccccttacttagtcagcagcagtgatgtaggaggccacatcagtgtgcacgtgcagcgcctggcacacagttgtgcagtagggatcctctgctagcatcataaagccagtatttgccgtgtagtgcagttgctgagatcctggtttccatgaattcaaatcccagctctaccaatgaccagctatagggctttaggcaagctgcttcgcctctctgtgccttagtttcctcatgggtgaaaggggataacggtacctctatccaagggtcgatgtgaggattcacttaagtgacatatgtgagcccttagaacagcacctggcagctagcaagtgccggttattaccaagctccaggcaggtcctggaattgagctcaaaataagacacaaggtcagtccctatgggcatttacagcagtggaagggggagatttttaaaaaatcatcattagttacaactgaggtacatgctttgaaagtacagggtgttctggcccagcgcagtgactcaagcctgtaatcccagaactctgggaggccaaggcgggtggatcacttgaggccaggagttccagaccagcctggccaacatggtgaaaccagtctctactaaaaatacaaaaattagatccacatggtggcacacacctgtaatcccagctactccggaggctgaggcacgagaatcgcttgaacctgggaggtggaggctgcagtgagctgagatcacgcctctgcactccagcctgggcacagagcaagactctgtctcagaagaagaagaagaaaaaaagtacggagtgttttgatgaggacaggggtcctaatgaactttgcctcttgctctgtggggggagaggtccagggaattgtgggaaaatgtaactgtttctcaggaaccactatcaaggacagacttttctagaaggacgtgggggagttcctagaaaaggaggcaggggaagtggaggagctgggttcagaaaggcctggaaacagggtgtagcctggcaggaagggtgcaggcctccaggtaccctccctcagcaggaatcagtatcaaccgtttttgtccttgttgaagattctaattccaggaccagggcactaggctagtctcaagtagtctatgggaggagcaggcatcttgatggacatctcctgagactgaatctcaggagaggccaatcaggcccagcaacagcagcccctgtggacagttgggccaggggttcttagcttttttgtgtcatagacaccttcttagaatagtgtgtttctttctttcttttttttcttttttttgttgttgttgttgttttggtggggagtggggagatggagtctcactctgctgcccagactggagtgccatggtgcaatctcggctcactgcagactctgccccccgggttcaagaggttctcctccctcaacctcccaagtagctgggattacaggcgtgcaccaccatgccgggctaagttttgtatttttttggtagagatggggtttcgccatgttggccagactggtcttcaactcctgagctcaggcaatccatccacctcagcctcccaaagtgctgggattacaggcgtgagccactgaacctggcctagagtagtgtttctgtttttaatttttttctgtgaaatatgttttattaatttttatttcaataggggtacaggcagtttttggttatatggaagaatagtgtttttaagcacataaaacatgaaggattacaaaggacaccaaaggtattcaaatattaggacaaataggtaaacttattaactaacaggatctagtggcagtctagtaacccctgttattttgaagtacagataagtgcaaacaaattttgaaaaatgtgcagcacttgtaatgcgttatgaaaatatctgtggttgctggaggggacaaagtcacaggcactgttaataccactgtggctgacagcctatgctcataattggaggaaatgccaagtatcagtaggcggttagaagaaacaagatgaaaatgttttccccattcagggactccctgatttaagctgagagcctctccttccagtattttgtaaaagtcaacagttatgtgaaaaaaaaaaaaaaaaaaacagatgaatttctgattgattgtatttttttggcaaaacaaaaaaatcacaaacattaaaacattgtgtatattaagtacatctagaaaagtgtatgcaaaatatttcatatttaaatagaagggaccagggctcaatgctgcttggcccggggcttctctctacctctccacgtggcgggagcaggtgagggtcggcatcagcccgcagggccggcggaggattgtttccctgcaccccactccttaaaaacgcgaaagtcaacttctgaagtccgttcacggtgtcctgggatccacgctggacggtggcggccgactttcagcttgacctgaattttattcctaatcagctgtgtgatctcggttggtcccaaacgtctctgagcctccctttcatctgtgcagctgggcctccagaccccaacccccaggcggtgcttaatcacgtagaccttattctgcgtgcactttaccacagttcaccaaccaccgagcgctgagagctgttgaagcacctggagcaacacaagacggatgcggagactggaaacagctggggaaggggacaagctccagccgcgctgtgggccggaggctagcatctgcgggcaaattcaggttcaacggaaggcaacatttttacccctcagaattgctctggacgaggaggcagcaccggatgggcgagggagggagcctcgctttggctgcgagccccaactcttgccaaccatcaattgagtataaattgagatttctgtacaggatgcccctccctctccactttcctccacctgcgtcggggtgcgagagacctggtacattttagaaatgtgcctccgctgagacacgtaggcgggcaatctcgcagggacttgctgggcgtggttacttccgcggatcttggcgttcccacatctttgaagtgcggtgggaatcggcggcgactacgttcacattgtcccaatacttcgttcctgagggaggaataaactaaaagttagtcataacctccctacgaccgcggcaggactcgaacctgcaatcttctgatccgaagtcagacgccttatccattaggccacgcggcccgtcggttgttaccgtctcttgagcaacttataaaaacgtcacctccgcccaccagctagctcgggaccaatccacctgctccttgagaaggggaggttggcctttggttcgcgcgttccgcagggagagcccacccagaagtyccccytctccccccgcgggcggaccgctccattggcggccctcctattggtcgcgctgggagtctcccgcttgcctctcgggtagccgcgggacctagctgggtgcagacgggaagttgcggctgccagcgaagcggaccggccgggtggaggccacacgctaccccgaggctgcgtaggccgcgcgaagggggacgccgtgccgtgggcctggggtcgggggagcagcagaccgggaagcaccgtgaggaccgaggtttccggcggggtcggcggcggggaggccgggtcgctgagcgayggcgcggcccctccctctccagtcagggagcgaggcccggagcagggcggcggctagtcccagggcgcaccgcggcgcctctgccgggcgcaggcgggcggcggggcgcacgggggtggccgccgactcctcctgcaggacgctctcggccgggtgggccgtggtccgggtgtgggtgtgggtcccgggggacggcggcccaccctgcgggttcgaatccgggcgctggcacctctcgacgctaggcccgcgccggtcgcggtaatggcagccaccatttgccgagcgcttgccaagagcagggccgcacgacataggcgccctgtgtcccycagacagcagcccggtgtgacaggcagaatccgtaatcccattttacagaataggatatcagggcctaaggagctttgcccaaggtcacacagctcgagagagccagaagcggggttcaaaaccgcgtcgccctactccagatactgctctcttactcgctgccctcggcttccccacgtgggttcactgacgaagttgcgtggaccccggttcccccaggaggggtattgacgtttcccaagttttgaggcttaacggaaaatgcaactgaagcgcctggcacagtgttggggacgcagtaaatgctcaaggaatgatgattatggatacacctattacatatatggtaaaataacgctttatatcatctgtctcctttaggatttggggtggaaggcaggcatggtcaaacccatttcactgacaggagagcagagacaggacgtgtctctctccacgtyttccagccagtaaaagaagccaagctggagcccaaagccaggtgttctgactcccagcgtgggggtccctgcaccaaccatgagccscctgctctggaggaaggtggccggcgccaccgtcgggccagggycggttccagctccggggcgctgggtctccagctccgtccccgcgtccgaccccagcgacgggcagcggcggcggcagcagcagcagcagcagcagcagcagcagcaacagcagcctcagcagccgcaagtgctatcctcggagggcgggcagctgcggcacaacccattggacatccagatgctctcgagagggctgcacgagcaaatcttcgggcaaggaggggagatgcctggcgaggccgcggtgcgccgcagcgtcgagcacctgcagaagcacgggctctgggggcagccagccgtgcccttgcccgacgtggagctgcgcctgccgcccctctacggggacaacctggaccagcacttccgcctcctggcccagaagcagagcctgccctacctggaggcggccaacttgctgttgcaggcccagctgcccccgaagcccccggcttgggcctgggcggagggctggacccggtacggccccgagggggaggccgtacccgtggccatccccgaggagcgggccctggtgttcgacgtggaggtctgcttggcagagggaacttgccccacattggcggtggccatatccccctcggcctggtaagtagggkcagggttggggacataagcaggcatgggggcccagcttaatagtttgtttcagtgaacattttctgaggtcctgttacgkgctgggtgctcacgtagggagcgctgatgtgttgaattagsactagacccctgtttatgtgggactcactttctggtgggaagatcacaggcagtaagcaaatacccaagtaaatgtcaggcagtaaaggccacgcagagaatcacagtagagcgctgtacatgagaccttcgggaggccacttaagatcacsgtgatttggtgcctttaccccctctcctaatagcgtcatgagaagttagtctgaaaagtcatttgaacagtgtttctatttggggagctattaattattttgggcrgtagaaagctcccttttgtgggactgtcccaggcagtataggacatttagcatccccagcctttcccataaacgccagaccaacacccccccccgcccccctgcccccgccggcaacgtttccagacgcccccttgaggtggcatctggttgaccacccctagttgagaaacattgcttccttcccccagccttccaagcaggcattttggtcccaaacaagtatatccaatctctcttttctttttaaataactttctaagtgctacccaagtttctttttcaaacaatgatggcagtactgtttctcccctttttttattcttcattccaggattaaaatactatttacaaccttaatgctttcaggcatggccagcaaaaaagttggcagtttctttattcctattggaagctacatctttgtaaagaaagctgcgaaatgttaaatatgcagttgaaaatggtgaaaacatggctaaatagataaggtaggcattaatggctgaaaagagcaaaactagatgattctgcattgattgagttccagttacaatgagaatcacactacttagaatatgtaacttgatggtcaaagtaaaggggaataycggccatcatttgaaaagataaagtaggctttggtggctgaaagaaaattaggaaaccagtgacaagaaagatttgttttttgatctgtcggtcattttaggccaaattacctcaagtccccttttcttttctctttctccttctttctctctttttacctctcctttccctccctgtccttccctgctctgccctcattctcattccattcttgccagtggtactcggggcattgcttagttgacctgatggcagaagtcaytgttaaggcctgggctcatgctgggaccttcctcctgggagtctgactggtgggtgggggtgggtgccacatggtgccctaatagcggtccactttgaacctgggcwwgcccctgccccttagctgagtaacattaggtacctgaccagcccacaatttacaatgggaggagaagcggtagtcagctatgagcctcccacagggcagcttcttcccaaagggtgttggtaagggcttcggccatcaggctagagggacgtctctctggccatcagcatttttctaagattcacagtaaaactagtattaatggcatggatccctactcatcttaaatttggcttgtttctttttaatcactagtttataatatggcttcatgcacagctgcagagctgcatcttgacaccagtgtggctttttactgtaaccaaagttcctgttaccaccatrgcctcaaagatttggcattctttagcctttttgtctgcgttgttttaagggctttgacatgctgaattaaaatgtgggggggtggggatttctttcagtcccttggcttattttcaccatttggagtatgagttcgattttgtcaggtttaaaactaggaacctctttttgctttctctttgaaagaagttagttttatgtgtgttgaatctgttgaggcagatactccctttttcccttccataaaggttgcaaggagctccttcgcagctgtgttgtccacacgtggcctcgtcactcactttgatgctgagtgggccttgattgtttagaataatctgtggcttgcaacaggcatttcctcagtggccattcccctacacctagccttgtggatcttgagcaaactgcagccttttcctgaatcagtgtcgggcccccaacaggcagcactcatcccctatccctcccaccccaaccctgtcacatacacatacattttctcattctggcactttccctggttctcactgagggtggttgcttctccaaggtgtgtgatttgctctttgtcccccagaatcttttcagccgtgagatgattcatcctgtacatgtgtgcagcagcatttgtcattttttttttttttgccaattcaattaaatctccaccttgggttctgttattgtctatctcctttactagtactttgaacagtagctggtttgtgcctgtagacgtgaggggttgataatgttcataaaacctcagagctagatgcagactcagtgaacgctgggcctagcaaacacctygatagcccaggctgtaatagaatacctgcacgtaggtctaatagcccagtagttccatttttatgtgcagaagtttaaagaagcttttgtagctcttgcccgccagcacacacacccaccctgccacacctgacctgtagctgtttgagttaggagcaccctttggtctcacttgtgtccccagctgccaatgcaccatctggcatgtggcggtaggtgtgcagtggttgttgtggagtggaartttaatgtctccatggtgaacctgyctgcctctcacctccctcaggtattcctggtgcagccagcggctggtggaagagcgttactcttggaccagccagctgtcgccggctgacctcatccccctggaggtccctaytggtgccagcagccccacccagagagactggcaggagcagttagtggtggggcacaatgtttcctttgaccgagctcatatcagggagcagtacctgatycaggtaaggttcctggggccaactgcaggttctggcatgggatgggccaggagccctaatctcagtggttaggggaggtactcctttcctggcacgtgtctctgttgcctttgctgaagccgcaaggcgcatctgttgaccagctgtgcctctggtctctgtgcctagctgttgtatgtccccgggaaagcctggtataggacctaagttgtcacaaagtaataatggccttcgtctctgtggcattttagagcttagcatgggtcttgaaggttttgagccacagcctgggctcacttcctgccttaaccaccgatgactactgtgagcgccttaacatctctaagtcttagtttccttttttataaaaaggcagacataacagaaatctcataggattaataggagggttggaacaatgcctgcatgtcaaacactcagcactctgcctggtgtatagtagtggcaattcttaattttatgaaaagtgttttttcactggatcttcacaacagccctagaagataggccaggcaggggagagcaaccttaccctatagctgagggtgctgaggctcagacagccttgttgacatgctcagggccacagagcttttgagtggcagggttggggccagaccagatagccctgaaggctttattttggccactctgtatctacgttgctcagagctattgttggaagctgagaaggacttgcacattgggattgagccaggcctgcatcttaaagggtggctaggatttgggaaggcaggccccttacaggtgatggggcaagcatgaacaagcatgaggattctgtatttggtgttgaaggctgtgtgctgggaggggaggctgtttgaggagctgaggtggggctggaggtccacaccaccaagcagtggtgggctggccccacagttgcagcctccctccttcccttcccttttctcctcctcctcctcagggttcccgcatgcgtttcctggacaccatgagcatgcacatggccatctcagggckaagcagcttccagckcagtctgtggatagcagccaagcagggcaaacacaaggtccagycccccacaaagcaaggccagaagtcccagaggaaagccagaagaggcccagcggtgagagcacactgccggtgggcaggagcatagtgcttgggaccccctctcaccagcccgtctggcccgaggccaggctgatctgccatgtcccttgctctggttccccagatctcatcctgggactggctggacatcagcagtgtcaacagtctggcagaggtgcacagactttatgtaggggggcctcccttagagaaggagcctcgagaactgtttgtgaagggcaccatgaaggacattcgtgagaacttccaggtatggtgctggagggggctctggggacatgggctgtggcacacccctagctgcacttggggagatgcagctgccaggcctgaccctgagagctggtggtggtaatgggatggctgcccaccttgcgccttcctgtcaccttgtgccaggacctgatgcagtactgtgcccaggacgtgtgggccacccatgaggttttccagcagcagctaccgctcttcttggagaggtgagggggagcccatgtgggaatctctgggggtcagtgtgttcctggtacccgggcccactgtaatcaggtggcgctggttctatctcaggttggggaccttagcttttctaggctgaaagaatggagcccttctgttcagtggtgtccatctgggccctggactctggatttgacagaggccctgraggggagggccatggagttgtgcttgtgtgtcatgtgcacggtcctggtttactgtgcaccttctctaactagatccttagccaagggcttcacatacagcgtggttatgtttattaatgagtctgtcttatgaagtgacccttgtatgctgaaaattcaggtatatttgtaccaaagatatggaaagaaaaaagaagggaggaaaatttgggtgtaacttttgactccctcagagcttaactactaatagcttgctgttggctagaagctttactgataacataatacatattttttatgttatacgtattatatactgtattcttaaagtaagctagataaaagaaaatgtattaagaaaatcatgaggagaaaatatgtttactattcattaggtggaagtggatcatcataaagatatctatccttcacgttgagtaggctgagggcgggggttgggcttgctgtctcgggtggctaaggctgaagaaaataaatgtgtaagtgaacttgcacgatccagacatgtgttgtttaaatgtcagctgtattttaccacccaagttgtgaggttcaggcatgatgtttttcatgtatgggattattagcacagtgcctggcacagagtcattactccacgtgtggcagccattttcacttttgccatctatatttcccacattacccctgaggatgggatgatattgttcccattttatagatgaaagaactgaggctccgagagatggggttgcttacccagggatgagtaacagtagagctgggatttaatgccgtctgacttttgagctgtgccatgtcagtggctgggttgaggcttgctaaaccagctcagggattgggccagtcttgcytcctgtggtcatttatggcagctcctggtgtttgcctccaaggtgtccccacccagtgactctggccggcatgctggagatgggtgtctcctacctgcctgtyaaccagaactgggagcgttacctggcagaggcacagggcacttatgaggagctccagcgggagatgaagaagtcrttgatggatctggccaatgatgcctgccagctgctctcaggagagaggtagccaggccttgggtgggcaggatctakgcaggggactggcaggtgggyggcctagycttcggcttagccttagccctgccctagtggactggctctgtaggtacaaagaagacccctggctctgggacctggagtgggacctgcaagaatttaagcagaagaaagctaagaaggtgaagaaggaaccagccacagccagcaagttgcccatcgagggggctggggcccctggtgatcccatggatcaggaaggtggggagcatgggtgggaggtagggtagggtaggggttgtctctgggaaggtcctgtgattgagggggtccttcgaaaggattgctccagccttctggagatgagcgggtgggagcagatcttattgagagttccttctcctgctcctgattgtcttcccccaccctcacagacctcggcccctgcagtgaggaggaggagtttcaacaagatgtcatggccygcgcctgcttgcagaagctgaaggggaccacagagctcctgcccaagcggccccagcaccttcctggacaccctgggtgagccctgcccacccccagcagtgtatctagagtctacccttgctccattctcaggacagccytggtctggggttctggcacagaggcatcatgcacatgtatacttaytgacctgctgccattcagtcacactgtcttccagtcctattctcatttgctcactctggaccggctyactggactcattcagcacagtgttgtgagcacctgctgtgcaatggcccgtggcagccacygggtgtacacactggagcatagctcctcctttccagtagttctttttcctaggaggagccaggcacgtagaccagccagtgcagctagtgtccataggtagagttctgactctgcctcgggaaataaatcaagaaggcttccttgagaaggtgccccttcctttgagcctcatagggtggcagagatgagaaaaagggcagccagggtgagcagcagggtgccagctttgcacctgcaagaccctgagagcaagtgtcctgagtgccttgctagtstcaccctgggctcaactctggtgaacagcctgcaagagagcacccagaaggactggtgtttctctagaggggtggggagggcagatctgctccctcctctggtcagttaccctggatgaaatggagcttgggaaggagccctgccctgggtcagggtatgcttttgtgtcctggcttctgactagtccagtgggactgacttagtgtctttgcttttgaaatattcttctagaggattccatgggggtcctggctaaagcatcccagaggaggggatggcggctgtaggctggggtcaccagaaagccccagggctttggagggtgggtggggacattgtgagagagagaaccttccccccaacaactgcccttaccatyrtgacactgctgtcttcctgctgggacgtagatggtaccggaagctctgcccccggctagacgaccctgcatggaccccgggccccagcctcctcagcctgcagatgcgggtcacacctaaactcatggcacttacctgggatggcttccctctgcactaytcagagcgtcatggctggggctacttggtgcctgggcggcgggacaacctggccaagctgccgacaggtaccaccctggagtcagctggggtggtctgcccctacaggtaaggcttaggcccaggggaggaaggggctggagcctagggaccccttcccctggctggtcagctcaggctagtggaaagagtttgggttcaagagtctgggttcagaagaagggaaaacaggaaaaaaattaacacacacacacacacacacacaccctctctctctctctctttctctctctctcactcactcactcactcwctcwctcactcactcactctctgggttcagggtttttcttccatggctacccttaccctctggatctcagagctctgggagggagtatgttgagatgttcacagtggggaggactaaaggccctactcttgggcccagaagcatagctgccttcacaggaacatgcggagggctgttacaagtagcagggagatgggcttttaaaaaagtgtgtgtatataatttgagtgataattatgggccaagcagtgcttcccttatttgttccccaaggagtcccatgagctagaatggttatccccatgttgtagttgacaaaggcttggttgacttaagatcacagaccctgagctttaggcaggcaggtgttggggagaaacttacagtggcccagaattaagagtcctggctcttcagggcagcctgagtctcttatggggccatgggaccaaaggggataacactggccttgctcctttgagcccgagggtaggtgagcggacaggagccagcctgcagctgggccttgggtcctgtcctcccgctgctgtgctctcagaacttctcttgagacggcagctctgtagtgtaagaggaacttggatttgagtgagacaaggccttgaaccccagcctgctgccagggtgctgtcattttcagtttgtcaatcaatccctgtctaaaacccgggaaagtgctatctggttctgcctcagagctgaytctgaggactaaacaaagggaattgtggaaggcactagcaagctgcctggcccagagtgggcatctggtaatcagcggctgctgytgctactgttctctgcccagagccatcgagtccctgtacaggaagcaytgtctcraacaggggaagcwgcagctgatgccccaggaggccggcctggcggaggagttcctgctcactgacaatagtgccatatggcaaacggtgagggcaggctctgaacctgagctttggggaggggaggtctctgtattccacccagggaaggggcagcctttgggtgggaggctggcactggtggctcaccccagactggcctgcagtgtctgagtaccatgcagggarggkctggtggattggggcctacccagtcccctgcttcactacyttggtccttggactgctccaggtagaagaactggattacttagaagtggaggctgaggcmaagatggagaacttgcgagctgcagtgccaggtcaacccctagctctggtgagcagtgcgccggcttgggttctctaggtgggtgctgggtggaaagggcttcctcttgcccacctagttcttcccagccagagttcccyaggtcttaagggggttggagatgccaccctgcccctgggaggccccacacgtgttggagcaaggagaaagcctgggtgagacctcatggccatcttgtcatttcccagctgatgacgacagtttcaggcccttttcccaccccctaccccatggcccttgctgaatgcaggtgctggagcagggcctgatataggtgtgtggccctcacagactgcccgtggtggccccaaggacacccagcccagctatcaccatggcaatggaccttacaacgacgtggacatccctggctgctggtttttcaagytgcctcacaaggtgtgtcctgggtcatggcctgtcctgtggtgtttcctcattctgctcaaggcccacagcaggccttcagagtgacacacctgagactttcctttttgtgggaatgactagtagtgggacagagtgtgatttcaggcacatactgtcatctctcagcttttgtttttctaatgaaagtcgggtggcaaggggcatggtggtggaattaaatgacatggggcacgtcgtatgtttgrtacracatctggtacgtgataggtttttccgatttgttrttatgcagggagccaggtttgcttgtgtctgtgtgtcttagggggcatgtgtgtgcacgtgtgtgtgtgcgtgygcgcgtgcgcgcgtgcgtgatacaatcagggatttgcctcagactgctgaggttctgggctcagtgttgggaggagtgcaggtactcacgttggttcyccacccaggggtctgccacctgcctccagcccctgcttcctttgctctgtccaggatggtaatagctgtaatgtgggaagcccctttgccaaggacttcctgcccaagatggaggatggcaccctgcaggctggcccaggaggtgccagtgggccccgtgctctggaaatcaacaaaatgatttctttctggaggaacgcccataaacgtatcaggtgggccaccatgggaggagtcctgggatgcctttcccctctcttcccacccagggacccctgactaaccctggmttcccacagagggccagcctgactatggtctagaggcctggctacttttggtcctggtgccatggaccttgggcaggtctcccctctagcttcagtttccctgttaatgtaaaaagaatggtgctgtaggaccatgagagcccttcgtagctccaacagaacttcttggtgtaactgctggagccgtgggctatggctgaggaccrtggagagctggtggcctgtaagccctgttgggggctgggagctgggtcttctagtctggaatggcaaatgtattcatcttgaaggccatttccaaggtggttgtggccatcagcacactggcgagcagagtgggtgttgggatggtgaagtctgcctgtgtgtaggaagaggcattggtggaaggagcgcctcatggatgcccccyggagaggagcggaagctcgctcggaggcctggccggttcccagatggtttatgctcttgattggtgtatcatagggccccagttcttggctgagccagggctcaccttgagtccagttagtgaggctgggtaatggagtatagcagtcctggaggtgggcaggtgagggccatggtgggatgtgggatagattctgcttcccatggctgtgctgagcctcacgttgtctgtccccacagctcccagatggtggtgtggctgcccaggtcagctctgccccgtgctgtgatcaggtatggtctgctgagtggttgtagggataggagaactgaggtgaggtggtaggtcctaaggccaaagcaccctgctaagacccatttccttcccctgcaccycaccaggcaccccgactrtgatgaggaaggcctctatggggccatcctgccccaagtggtgactgccrgcaccatcactcgccgggctgtggagcccacatggctcaccgccagcaatgcccgggtatgtgacctctgtacctctggcccctgctcttcctctcccaggtctgtagaaactgggctctgagggcctttaggtatttagtgaggatcatgaaaaggaccctgtgatctgggtcaggcaggactctagtcaaatctggcttcatgatttctgtccactccttcagtaaatatgttctgggcacctgctcctggccagacagtgacaggcrtaatagctacagctctcatggaatttagataggaccatgtaggtgaggggtctggcatagcgctaggcatagagtagattctttacctgtcacaccaattgctgataggtggccatctctggaactgtggaatttcagcagtgctgtctggcattctctaaagccatcccctcaggaaaggctctagctctttctcagtcaactctggctccaggaatggggtaggaagagtctcatttgggtatctcactcttcccacagcctgaccgagtaggcagtgagttgaaagccatggtgcaggccccacctggctacacccttgtgggtgctgatgtggactcccaagagctgtggattgcagctgtgcttggagacgcccactttgccggcatgcatggtgagcaggagccggggttggggcagcccagcccctcadcatattgacagttctgatgaacrttgggcagaatgttcctgagctgcttttctcactcctgcttgtcttccaggctgcacagcctttgggtggatgacactgcagggcaggaagagcaggggcactgatctacacagtaagacagccactactgtgggcatcagccrtgagcatgccaaaatcttcaactacggccgcatctrtggtkctgggcagccctttgctgagcgcttactaatgcagtttaaccaccggctcacacagcaggaggcagctgagaaggcccagcagatgtaygctgccaccaagggcctccgctggtgagggtccctctcccatccactttaacacccaggacccgaggcctgctttactgtcctttagtactmccatctgttctatctcctgcccattacttgaactctcacctagcccytctccttccacacctgtgtaacctggttccaggatgatttgtcctattgtgacatttggttgctttatagtcagccttaaacagtttttcctcatgggagtaaagctatacttttggtatactgttaccaagtggtagcatcttgacaattctgattatgctgcatmatcaataatacaggggttgcaaactcagatgcctacagggaatgagagcaaatggagtgggtggaagacaggagttgacaggagggcgctgtggcaaactggagcatgtaggctgatgttgatactggagaaagcattaccaggcctccaggttacttagcctagctctccaatttgtttcctctgatcgtactgcatactgtgtgctcagggccttagcagactctctgcagggttccaaaaacattgagggaagagaggtacaacttcctgaggtacagyacactgtccacatttaattagctggctcattgtggaaacttcactttctcgtcaacaactaaaagttaagtatgtgataaatgatatagtggttgatgactataaatgcagggaaggggagctgagtatcgtccagtggataaagtgaggtcgggtaaggctcataccgtgagcagcgtgtgctggtggaggcgagaaaggtggtggggctttagttgtggacacctttgaaagtgtcacaggagtttggactgtgggtgcaggtggtggggaagccatttatgcgagtgacgtgtctctggagccttcaggcgacaagccttgtgaggtctgcaggttagatggaagctgggagttgtctagggttgtggcagttgagaggggtaagccaggcctggctgttgtgttttctgcttcaacaaatgccccctccccttcagggagtagcctattcttacccctatccccccaaatctagagtgatggcccttgctgcctcctgaataaaaggcccgtgttggtcattgggcaattcagtgtctaaagaaacaggacagtaggaatagtggtgcctcctgtgctggagtctttgtcctttattgggctaccatggggtggcccaggctttggggctacaaaagcctgggctgcatctctttctagctccatgatcctaggcaaggcacttagcctctctgagccgtttcttcctctgaataaaagcctttaggggactggcatgatgtcagtgtttttaaaagttraagtgatatgtgaacattccttgccaaggcactagcgtggcacaggaagcactccygtggaatgatggtgataacactgcccccaggtatcggctgtcggatgagggcgagtggctggtgagggagttgaacctcccagtggacaggactgagggtggctggatttccctgcaggatctgcgcaaggtccagagagaaactgcaaggaagtaagaaccttctttgtgttaaggatggagggaggggtctgggcttgccccagaagagcttrgatgctttgttttttagctttgagatgctgraagacaaagtctgccctctgtttcyggtcccttaggtcacagtggaagaagtgggaggtggttgctgaacgggcatggaaggggggcacagagtcagaaatgttcaataagcttgagagcattgctacgtctgacataccacgtaccccggtgctgggctgctgcatcagccgagccctggagccctcggctgtccaggaagaggtatcttgctacctttggagcatgggcagaggggccccagggagggcagggcagagctccctgtggaccttaccaatgtttgtaggtagggccagagtgaagcttctcttggggcttctaccctggagttaattggtatgtagcatagcccctttcacctctgcccaccttcccttcccagtttatgaccagccgtgtgaattgggtggtacagagctctgctgttgactacttacacctcatgcttgtggccatgaagtggctgtttgaagagtttgccatagatgggcgcttctgcatcagcatccatgaygaggttcgctacctggtgygggrggaggacygctaccgcgctgccctggccttgcagatcaccaacctcttgaccaggtatgcggggcccatggcctctagcctggccatgtgctcctatgtggggctttgggtgagcgttccttgggccagactggtcagttttgacttttcatccccctagaagtgaatgtttcagcttatttatttatttctaatttttaaaaagttgtagaagtcctaaaaagactagcctcaattcgtaaaaaaagagttattgggtttgaaaaygtgaaataccaagactgatcattgagggaagcagtgaggttaggggaattgttccgaagggtggtactcacgcttttctatttggaaaatcaaatgacagaagccttttctcatttcatagaaaattgagatgtttgtttttctttctcccataaatgttttctttcttaagtaagtgccaaaagtttgttatttgactgctaacagaaaacactgttaatggggacactcaaatgtgatttttaaaaatatcttatatattttatatattgagttgtattttcttgtagtaaaattcctagttcatatggatgaattaaatattaccgttccatgttgatctgccactcagaaccagtttgggaaccatgatctatcctgattattgggtaaataacagatgtttacaatattcaacattgttcccattgccctcttaatcatcatctccgggaggttatgcttaacaaagctaaaagtcctcatttatgcttcaaactctggcccaattggaagtgatttcgtatattaattaataaagtgtaccaaactgggaaaaaaaaaaaaaagtatgttgagtccataattgcatttcagtatctcagtgggaggttaggctgctggatggmaaacagtgctggaccttcacctttcttgacttagctaagtgaacagatggggtgttggtccaggggaagccctgctctaaggggtgtggggtcattgctccaggagtgatgcatctgttcacmggaggggcatgactgtgagagkagattgggtctctttcaggtgcatgttygcctacaagctgggtctgaatgacttgccccagtyagtcgcctttttcagtgcagtcgatattgaccgstgcctcaggaaggaagtgaccatggattgtaaaacmccttccaacccaactgggatggaaaggagatacgggattccccagggtgagcacaacacatttgttcctcattacacataggatctgaggtggrctagaaagtgggtcttggagaacaggaaacytggggccccagagaatccactcttgactcaggctatattctaggctaatttcagtttataaggtgccctgtgtccagagtgaatgtgatatgatgtttcaraaatgaaggcagcagagcttcaaatattctacctgtacctgtcccstacttcaaccacagaagaaatgtttaaagakratttattctatagagtgcattcttgcactctataggtgacagaaaaacaaactgtgctttaaataccaaacaagtaaatcagaaagcttattttctatttaaaatatatctaagacacacttatataaaaagaaaacagaccctcctaacatgtaacattaccgttcgtggcaattgttctcaacctttcaytctccttttgaccttagcattaagctmctttgctcacttctgagctctcagttacagttcttgaggtggcatcctaaccaatttscactrtctttcaggtgaagcgctggatatttaccagataattgaactcaccaaaggctcyttggaaaaacgaagccakcctggaccatagcactgcctggaggctctgtatttgctcccrtggagcttcatcggggtggtgcaggctcccaaactcaggctttcagctgtgctttttgcaaaagggcttgcctaaggccagccatttttcagtagcaggacctgccaagaagattccttctaactgaaggtgcagttgaattcagtgggttcagaaccaagatgccaacatcggtgtggactacaggacaaggggcattgttgcttgttgggtaaaaatgaagcagaagccccaaagttcacattaactcaggcatttcatttattttttycttttcttcttggctggttctttgttctgtcccccatgctctgatgcagtgccctagaaggggaaagaattaatgctctaacgtgataaacctgctccaaggcagtggaaataaaaagaaggaaaaaaaagactctatcttctcatcaaagcctttgttagtcatgctttccccactttcccactcacaggaggtaattatgttgttgaagaagaggaaggagtcctccaaagtgtagagtaataagacagtggcacctccttttaggacttttgctatactgaggatacttatgggacaaaatgacaagagaagaagccattgacatcaaaatgctacatgactctcctgagtgcagctgccaagtgggtaaagagagtggatggggccaggtacattagagcctggagtgtgatcatctgaagaatgcatgttcaaaattctgaaatccagggcacttgtatgtaaacttccagttttgaaatgggagtgggctactgatttgctacttattagacaaacctaagatgaaaattttaggtgctagaagtaaggaaacattgggttctgtttcaaaggtggtgcagggatggggatgcggtactgtcacttgctaagagtaaagggagaggaacaaaccacaagggaaaaggacaagacattggcatgaattgaaggaagaagccttaacccaaactaatgagtggcctttgaatgagggcatgacatgagaggtaaactagtttctgagccagactgctatagctggtcatcatccagtagtttaaaagattaacaggaagaggacccacagcaggacattgttttgttaccacctgcttcctggaagtgtttatcaaacaagtcggggcaacttcataggattttgtgtggtccaaagtttacaacccttctgagagtcctttgctctcatctttgcctgatcaccttttagccctttcccattctgttgcccttccactaatctgtgactgctcccagataggctgctaaccagctaggaagagtggctgggctccagacagaagccagcactgacctcttcattttcatcttcrccatcctctcgaagaaccatgtctaggatgtttcctttgatcttgaagtctcgtgaggtrctgagcttcatgtgctgcatcaggttcacctatgacaagattgtaagcatgggacatctccctactcataggtcctgccagaacagcttaagccatttttagttcacctctgagaaacctttccatttctacctaaagcaagcacgcacccacttccttctgtatgctggggttcaggtcatcagatcaagaacagcaaagaggctgagtgtggtggctcatgcctgtaatcccagcactttgggaggccaaggtggaaggatcacttcaggccaggagtttgagaccagcctgggcagcatagtgagaccccatctctacaaaaacaaacccaaaaaactagtggggtatgatggcatatgactgtagtcccagctactctggaggctgaggccagaggatcacttgaatgtgcactccagcctgggtgacagaatgagacacagtctcaaaaaaaaaaargggggggggggagaggggggatggcaaacacacaaatggcccagagtctcttttcctccattgtagttgtgctgcttcagtttgccagatctgtcaagaaggtaaatgggaatggtagcacataataagagaatgtttaccttggacttcttagaaaggtggatgagaaatttttcatactgttctatggcaaagatgaggttagggattggcttggtttcccgaagaactctggcctaagggcaaagaacataagacttaaatttcaggttcaatggtttttgaagttttcctctgaagctgtcacttacaaaactgtatggctttaggggaaaactagtctgtctcccaatcaaatgcagttgtacttgtataccagtaatctacaatttttggcagttcaatctggaaggacccaaatgccagtagagataattgcactgatccatttcatttataattccagtatttgttgttatctagaaaatggctgaggagggcaggatcacttgtagaaatttagttgcttttctgacttgaaattcttaagcctattttggccctagctctatttccttgttctggtctgggtatgaattttcactgctgggattatatatctttccccctaacgtgaattgtaatttgtaggttctacgtgtgtgtgtgtgtgtctttccccctaacgaaaggtcctacatttttgtgtgtggtcctacgtttttgtgtgtgtgtctttcctcctaacgtgaattgtaatttgtaggtcctacatttgtgtgtgtgtatatgtgtgtctttccccctaacgtgaattgtaatttgtaggtcctacatttgtgtgtgtgtgtgtgtgtctgtgattatatatctttccccctaacgtgaactgtaatttgtaggtcctacatttgtgtgtgtgtgtgtgtgtgtgtgtgtgtgattatatatctttccccctaacgtgaattgtaatttgtaggtcctacgtgtgtgtgtgtgtgtgtgtgtgtgtgtatttttaacccatgaggatactgtacaaattttttttaacattatcttggagataattccagagagctgaacatttagatgtttatttttttcatatctctccagtataaatatattataacctatttagccagtcctctattaatggatatctttgtttctaatatttcacttttataaataatgttgtgaggaccatcctgtacacaggcctgtatatcctaaaagtgaaactgctacatcagaatgggattcagtagtcattgctaagcctctggagaggctgtactaattttcacctttgccagcaatgtactaagtgcctcctttcctgtacccccgctgactcttacacatcttttagggagcaccttttgcattcaccaactttacctaaaaataatttctcccaattgagtatcgtaagttattttactatttccatttcaactcaagattttctggtgcttcgtgaataaaacatgtttttggttcagaggaaaaataagatgctccatctgatcataaaatccctgagttgagaagcagccatgtatataatacacacaattttttctaacagcttgatagagctgtaattcatataccatacaattcactcacaatgtacttttttttcagtatttgcagagttgtgcaaccatcatcacagtcaattctaaaacattttcatcacccccaaaagaaattccataccgtttttagctgtcaccccagtctccccatcttccaacccacctagctctacgctaccactaatctagtttgcctttttagatgatttattctgggcacttcatgaaaatggaatcatacaacacgtggtctttttgtcactggcttcttccgcttcatgttttcgggttcaccaacaagcatattttaacggtcagtgtcagcagcttaccatggctgtggcaacggcagcaggtttctcctttttctctcccgtatagttcaggctcttactcttattctaaagaaatagaaacacattctcttattcctgatgatttttctgtggagctagcatgctagtgctaattttttttttttttttttaagacagagctttgctgtcacccaggctggtgtgcagtggcgtgatgtcgacccactgtaacctctgcgccccgagttaagtgattcttgtgcctcagcctcccgagtagctgggactacaggcacgtgccaccacactcagctaatttttgtatttttagtagagacggtgttttgccatgttggccaggctggtctcgaactcctggcctcaggtgatctgccggcctcagcctcccaaagtgctgggattacaggcctaagccaccatgcccaccaactagtggcaattttcttagaaggtaattacacagggtatgaggaccaagtctggagtaaacaggactatctgtgcaacagatgttagaagatagggaaaaaatggatgctttgtaatcctcagatattttttcttttttagttgttgagaggtttacaatctgttgttcttagagctggcacatggaagttgaaggcaggactattactgcagtgggtcagccaaggggctggtgaggtactaaagaatggttaaaatggggactgtcaaggtggtagcaggaatattcatttctatttctattttagccagtgggctagaaggatcccataaaggagaggaagctgaggaggctgctgcagggccctgcagtcttcccacttacaggcaatcaccagatatattttattttcgttactcagcaaagccaaaaccagatatattttatgtgcaatgggttatcatgctcaagaagggttaaaagggtcacagaacacttccctgtgttgtaaattattgggtaataaagagctcctggagagggatgaataactaataaaaggaaccaaaaagtgtaagattctgataaagcaaaagaaaatcaagacttgagtcaggagagactggggagaaaaaccacccaaatgtaaggtacggtacagaaatgtaggcagctttttacctcaaggggagttctaaaccttcttaggaagggaacataccatgctccacgagggcaacagaataaagaaacagacctgaaaatacagagaggctctgcaactggagccatgagagaaacaggagacttgttccacatgccacgttctggaaaataaggaactgcagacattccagaggggctggtatgcagtaatctgtttttggccctggaaggcagggtagaggatggaagagggtgaaggcagcagaagagggcaaggaagcagtcacggatcgacctcactgaccaagtgggaagtgaaccatcttcccagaggttgtgtccaagatggggccctgttggaactccttagatcaaccctgttccctgcccattccaactgatccgggcgggcaggactaaaattagagccagaagagaagcatctttttttgaggtggagtttcactctgtcgcccaggctggagtacaatggtgcgatctcagctcactgcaacctctgcctcccaggttcaagcgattctcctgcctcagcttcccgagtagctgggattacaggcacgcactaccatgcccggctaatttttttttttgagacagagtcatgctctgttgcccaggctggagtgcagtggtgtgatctcatctcactgcaacctccacctcccgggttcaagcaattctcctgcctcagcctcccgagtagctgggattacaggcgcctgccaccatgcccagctaatttttgtatttttttttagtagaaatggggtttcaccatgttggccgggctagtttcgaactcctgaccttgtgatccgcctgcctcagcctcccaaaatgctgagattacaggtgtgagccaccgtgccctgctattttttgtatctttagttgagatgggatttcaccatgttggccaggctggtctcaaactccagaccttgtgattctcccacctcggcctcccaaagtgctgggattacaggcatgagccaccatgtccgacccttgagaagcatcttttaaaggtatacagttctgggcaggatgctaagagttgcagcaatggttttcgttgctttcttcccattgagatctaaggaactggggaaatgaagagggggctacaagagaattaacagttcactgagaggtgtggaaaatgcaatccccatttctagttaagagctggagttaatggaaccatgcatgggctcttgcccagggggcactcattaaatacatctcacaaaaacagaaaaatgtaaaatgtttgcctgcagatcagctgacttgtcagtaaggctttaagtcaaatatggatggaggaggaggaaaatgcctagggaggaaatgaaactgattactgtgtaatgaggggaaaataatagcagtctaggaagtagtagtgattcccagaagaaaatgcttgaaaatggggtcagaaacacgaaaatcaaaaccttccaacatr

SEQ ID NO: 95435 - DNA, 76789 bp, Homo sapiens
ggtgtgaggtttaggtcaagtttctttatttttatttttaaatttttgcctattaacattcaattgctccagcaccatttattgaaaaagcctatcatctcattgaattgttttgaatctttcttaaaaaatcagatggacatacttgtgtggggctatttctgggtcctctattttttcccattgacctatgtattcatccttcgataataccaaacaatcttgagctatataattagatttgaagctgggtgcggttgctctcgtctgtaatcccagaactttgggagcccacagtgggaggattgcttgagcccaggagttcgagaccagcctggtcaacatagcaagaccctgtctctacaaaacatacagaaaaagttagccatgcggggtgacatgcacctgtagtcccagctacctgggaggctgaagtgggagggtcacctgagcctgggaggttgatgctgcaatgagctgtgtttgcaccactgcactccagcctggacagcaaagtaagaccctgtctcaaaaaaataataataaaaattgaaatcaggtagttccattttattattgttttccaaaattgttttagctatttattctatttattctagttcctttgcctttccacatacattaaaaaaaaaaatcttttctacatcttcaaaaaattttgctggcattttgataggaattttgttaaacctgtatatcaattaaaggagtattgacatcattactacgttgagtcttcagtccatgagcttgaaatgtctctttctttagatctttaatttcctttcttttttgagacagggtctcactctgtcgcccaggctagagtgcagtggtgtgattttggctcactacaacctttgcctcccagactcaagtgatcctcccacgtcagcctcccaagtagctgggactacaggctaccatgcccagttaattttttgtatttttttttttgtagagatggggtcttgcccaggctgtgttgaactcctggactcaagccatctgtctgcctcggcctcccaaagtactaggattgtaggcatgagccactgtgcccagctgatctttgatttcttacaacaatcttttgtagcttttagcttataactcctgtacatgttttgttaaacttacacctaagtattttgattttttgagtgattataaattgtactgcatttaaatttttggttttcatgtttgttgctagtatatggaaatacaattgatttttctttttttaaaaaaaaatttttttgagacagggtctcactttgtcacccaggctggagtgcagtggtgcaatcatagctcactgcagcctcaaactcctgtgctcaagtgatcctcccacctcagcctcccaggtagctgggactacaggcacatgtcaccaagccccactaatttttttaaaaaatttattcgtagagatgggggtctcactatgttgccgaggctggttttgaactcctgggtttaagggatccttccatcttggcctcccgaagtgctgcagttacaggtgtgtgcccccttgttcggctgtgttggcatctgttcattgtgttttcttttcttttctttctttttttttttttgagatgaagttttgctcttgttgccccagctggagtgcaatggcgtgatctcggctcaccacaacctctgcctcccggtttcaagtgattctcctgccttagcctccgagtagctgggattataggcatgtgccaccatgcccggctaatttttgtatttttaacagagacggggtttcaccatgttggtcaggctggtcttgaactcctgacctcaggtgatccacccaccttggcctcccaaagtgctgggattacaggcgcgagccaccacgcccagctgttgattgtgttttctcattgaagtttagattttcccatttcttggtataatgagtgctttttggtggaaacctggactttggggtgtcataagactctggatctcatttaaatcttgtgttttagcaggcttcctgacccactttggcaggggaaggggatgcctcttcattattgccaagtaggggtggaagtccaggttttccacttggcctttgttgacacgtggagggaggttgtttggcacaagtgggagttcaggctctccagttggcctccagggataccacccttgctgggatggggaggggacctccactgatatgtggggtgggaggtggctttgttgcaactgagtgacgttgaaagtcctgactctccacttggctccctatggggacaagagtgactattttcaatgcgaatccgctaactccaattccaggaatgcctccaaaatgtctagttgatgtattactctttataccggatcacctattcactgtaacttttgcctttttacagaaacaacccttgatgctgttgcagaaatcataggttgtgacacccacagcattctctcaaccatctacacattcctccaagagtaagtatattttttccccaagatataagccctggttctacggggctactgtgtggagatccacctgccttgtggacacccaagaccatgcttctgtctgtaagctccctctaataattatcctatatggacaaactggatttgtctgcttcctacgttttctcagctccttgggcatttgggggtggctttgggggtggctttgatggaacactctctctgacatcaccccagggaagaggatgagtgctttcttacaattaagtggggtagaagtccaggttctccatatggtttccactgataccatgctgggggagagtctcctcacctctcagtgggaatgaaaatccagccctcggccgggcgcggtggctcacgcctataatcccagcacttcaggaggccgaggtgggtggatcacaggctcaagagatcaagaccatcctggccaatatggtgaaaccccgtctctactaaaaatacaaaaattagccaggcgtggtggcgtgagcctgtaatcccagctactcaggaggctgaggcaggagaattgcttgaacccaggaggcagaggttgcagtgagccgagattgtgccactgcactccagcttgggtgagagaaccagactccgtctcaaaaaaaaaagaaaaaataaaaaataaaaataaaaagaaaatccagccctccacttggccttctctgacaccatgccagggagaggggacagtggtgcctctttacagcctagcatgcgtggcagtctaggctttccaagaggcaagcatggggatggggctttttctgtggtttgggctggattagagccattattgtgtaaacgttttctgtcctctgaggctgcccatttcctggtcctgtggctagagagagaaggcttttcttagggcattgtctttgcctgtcggcatttccaggttgcttgcttcctagcacccagtctgggatatataaggcaacacccaccatgttgttccttgcgtcccagggtggctagctggtttgccttctctccaacttttggagtcttagattgttttatatataatgcccacaatttttagttgtacttagtaaaaggaatagggaaaattgtgtctagttcatcttcctggaaacaaaaatcttccatcttgttttcatagaaggccatggaactgtgctaaccactggaatctatttgttttgtttgtttgtttgagatggagtctcgctgtgttgcccaggctggagtgcagtggcatgatctctgctcactgcaacctccacctcctggtttcaagtgattctccttcctcagcctcctgagtagctgggactacaggtaaacgacaccatgcctggctgatttttttgtatttttagtagatggggtttccccatgttggccaggctgatctcaaactcccgacctcaggtgatccgcctgcctcagccttccaaaatgctggattacaggtgtgagccactgcacccggcccactggaatcctttttgtataatatcctggctgcgaagttagagtttttacacttgcatttggcagatgcaattcaaattggttaccaaaactttgaaatatattgagttgcttctaaaacaaattccatgcaggattgaagagtgggtaggctaagagggtagcaggcctgggaaatgaaccccaggaaactgacttagtcatgcaataaagactcaggtgttaccagtggagagtgtccaggttcttggcgttttgaacaaacaattggacaaaacgcacaaacaaagcaaggaaagaatgatgcaacaaaagcagagatttattgaaaacaaaagcacactccacaggttgggagcctgcctagcaggtggctcaagagcccggttacagaattttctggagtttaaataccctctagagggttcccgttggttacttggtgtacactctatgtaaaagaagtagtggcctgtgatcagcctgattggttgcaagaggggaccaatcagaggtaccttcaatttttcatctgccaggcagaaaagcggggcaggttgcaaagggactagcttctgttccttttgttacctgggcatggaaagttcgggttttccttttgatttagttctaggaagtcagcgtgaattggccttaggttccctgtctccagaccctatttttctgccttacggttcatattgggtttgctacaaggatattcaaactttgtgaattggcaagcaggaatctagagtttccagaacaatggagaggggccagaaaggtataaaaacttttgtgaaaacgtcaaaaataaatatttagttaaaaataaaatttcccattttcagattttgtgaatatctgtaagaatttccaggatatattaattcgctaaagttaataaaagcaagaaacagaaggacgtttcagaatgctattgtttgtgtaacaagggggtgctgaatacatacataattgcttggttatgaataaactggctctggaaggacacacatagctaatagcatcgttacctagggggaggtgaagtgggtcctggagaacagaaagggagattttccaccttacacacatttgccatcttatgattttgaacgataagagtccccccgccccttccttcctctgccctgccccttccttcctctgccctttactctctcaatatcctcttttcatgctttttttttttttttaaatcacttcgggtcctttaaaaaatttacttgcaagaagtacgtacatattctgaataaaattcattttcagatatatgtattacaaatatcttgtctgttctattgtctttcccttttctcaatggggtcttttcggtgtcttatagttacagacacccaatttatcagctttttcctttaggactggcactttttgtgttctgctaacacgttattttcctctcttatggtcataatattctgcgattttattgtctagagttgtattgttcacattcaggtctaccatccgtctagaattattttacttgagataggagtcaaggttcatttccccccaatcgaccttcaattgacctagcactatatattgaaaaaactcttcttattgcattacagtggctacttgtaggaggaaaaagtgactacatagctgcaggtctgtttctggtctctctctttttcattcattgtttttacctttgtgccagttatcacactgttctgattactgtggcattataatcatcttgataactgtatcgtgaattctccaactgtgttcttcgccggaagtccacggaacaccaaccacgaccttcggaatttccctccggaagatgaaggcactgtagttatgcgggtggaccctatcagatctcgggtccatcgggtcctgtgtacaccttgagggacgcccacccaacgcgcatgcgcagcctcaatgctgggattggacggagcctcgccggctgcgtacacgtcacttccgaggcgggaggatgaagttgattgactatggtctctccggcwaccaggtaggggctggggaagaaggaacctccgagatgaggcgatagggtctggccttgagctgaggcgacgccccggcttgggtgaggggaagcggtgtagtggtcgagctaaggccgcgggccctgggcggcttccggatccccgcgacgccgaactctgaaggaagactcagcccaggcgctgggaccagagccctggctccggcgagtgcgtggcggggaaacccgcctgtcgccgaggtgtcttgagtccagtttccgctgctgggaatgggtgtcgcgccgggcgctgtgtgtgaaaggcctcgcgcccacagggctcctggcttcaacctgtttattcccacatttctgcgcgacgtaggggaggctccgcagcgtctgcgagtggcaggaccgagggttgagcgctgggggccagtggcaccttagccagtgacggcgagttaggactagcaaaggaagtccggtttttcagaaggcaggaggagggtgctgactcgagcgtccacgggaatggctggttgagatatcttgctcttccaatacttactctgcggcttcctggctgtgcggctttgggcaaatgttttaaactctgagtgtttcttcagctgtaactttgggagtaacaagcccactcataaggttgttgtgaagcgtaaatgagactgcgcgtgcaaggtgctcagctggtgtctggcacatagtaggtattcaacaaatggtagccacataatgctctttttttcagtttccaaaccttccatgtagtgattggagaatcgtgaagttacttttgaagtaacgtttgggtttcacacactcatacatttagtaagcagaattcttgcttacactgttgccgattgcaacggtgtgtttgcataatggaagctatgtttgtgcctttgccaagggtgtggaatatgccttccctaccatgtacatgtccccttttctccattccttaataatagttgatattttttgagtgtttgctatgttacaggcactgtactaatccctttactgaattattcaatcctgtaataaccctaatcataggaactataatttttatttatggagggagaaatgggcttagagatgttaagaagtttatccaaaggcatagagctattagccaggcaaggtagcacacgcctgtagtcccagctatttgttggggctgaggcaagtggattgcttgaacctgggagacaggctgcagtgagccgagatcacgccattgcattcaagtctgggtgacaaagtgagaccctgtcttggctgggcgcagtggctcacacatgtaatsccagcactttaggaggctgaggcgggcggatcacctgaggtcaggagttcgagaccagcctggccaacgtggtgaaaccccgtctctactaaaaaatacaaaaattggctgggcgcggtggctcacgcctgtatttccagcactttgggaggccaaggcgggcggatcacgaggtcaggacctcgagaccatcctggctaacacggtgaaaccccgtctctactaaaaaaattcaaaaaaattggctgggcttggtggcgggcgtctgtagtcccagctactagggaggctgaggcaggagaatggcgtgctscggatggcggagcttgcagtgagccgagatcccgccgctgcactccagcctgggcgacatagtgagactctgtctcaaaacaaacaaacaaacaaaaattagccgggcgtggtggtgggcgcctgtaatcccagctactcgggaggctttggcaggagaatcgcttgaacctgggaggcagaggytgcagtgagccgagatgccgccactgcattccagcctgggcgacaagagcgaggagactccgtcttaaaaaaaaaaaaaaaaaaaaagtgacaccctgtctcaaacaacaacaacaacaacaacaaacaacaacaaaggcatagagctagtaaaggccgatccaatgccatgtcactccagaacctagcgcttagctacaaatttcattcattccttcagatacttattgaacgtttacagtgtaccagcattgtgctgggtgttgtggatacaatgatgatcaaaacagataaagcccctgtctttaaattgcttataaatctagcaagggagatagtaaatatataaataaaactaaatattaattacgattgtgatgcatgctgtggaggacagtagagggtgctgtgaggatacataatggagtcaccggcatgcggagggggaaatgaggagagacagggaaggctttcccaagaaaataatatttagctgagacttaaaggactgagttggagttaaattggacaaagagctaacaggaggagggaagggcatgtgtgaggtcttgagactaggaggagcttgtatcttgttacttaaagacccctgtgaggctgtaggtggtggctcacacctataatccgagcgctttgggaggctgaggtgggaggatcatgtgaggccaggagtttgagactagcstgggcaacatagggagaccccatttctacaaaaaataaaaaattatctaggcgtgctggtgtgtacctgttgtcccagttactcagaaggctgagtcaggaggatcacttgagcccaggagtttgcggctacagtaaactgtgataatactacggcactccagcctgggcagcagagtaagaccctgactcaaaaaaaaaaaaaaaaaaaagaaaaagaaaaaaataagcattaaaccagactggaatgtattatggataatatgctaatgcagtttctttcagaaaagaaatcccaccacttatttgtatgcagctgagcagatacaacccattatgtagtctcaagattaatggtaatttgtcctcttataagaagacttgacagcaccatttgctgtacatgttttcatagttcattctaaattcacctggtaattgggttggtcatctgtgctacctasttacttttttccaaaggaaaacatgaaacagctctatgataaaacaagtagttgaggtgcctaggctaaacttccacagtgatagggatagggctggggcattgtcttcctggatatttccatttaaaatagggggtttggctgagcacggtggctcacgcctgtaatcccagtactttgggaggctgaggagggcagatcacctgaggtcaggagttcgagaccagcctggccaacatggcgaaccccgtctctattaaaaatacaaaaatgtgtggtggcgtgtgcctgtaatcccagctactcaggaggctgaggcaggagaatcgcttgaactgggaagcagaggttgcaatgagtcgagattgtgtcactgtactccagcctgggctacagagtgagactccayctcaaaaaataaataaataaataaataaataaacttaygtatgtatgtacgtacgtttgtaaagggggggttccaggcccttcagaaaaacagtcctgggttttactgtatttactgggtttaaacaagctaagctaggggtagtttatttagcctttaaaaagatttgcatacatatcaaagggacagaggaataatttataaatactgggtttttcaaagaaatgctgtgaggaaaaggaaggagagaagatctctttccctttggaaacagtgaaaattcagttttaaaatttttactatatgtttgcatgacaactaaaaaaaaaatttacttacagtacagtaaaatgttggactagagcaacatccataatgttggatggtgtaggaattattcattcccaccccattatacacataagaaacctttctttggtagccaatgttattttaatgcaaaaatgaactctctattctggaaggccataagcatgagggtgaaaattgggattgaatggtgtgtaaattcagtttgaaagcttcttgccacccacccagataggaaatacaacaaattccttaggattttacctgagctctccctcctatcttctaaagttcccagtaacatgaggcttggccatttaaactgcttagtggagggagaggtctgtgatggccactgaatttgctactggagaagagtcttgatccagacctcaagagagggttsttggatcttgtgtaagaaataatttgaggccaatccatagagaaaagtgaaagcaagtttattagaaaagtaaagaaacaagagaatggctactccataggcaaagcagccctgagggctgctggctggccacttttatggtcatttcctgattatatgctaaagaaggggtggattattcatgaattttctaggaaaggggtgggtaattcccggaactgagagttcctccccttcrtagactatatagggtaacttcttgacattgccatggcatttgtaaactgttatggtgctggtaggagtgtcttttagcgagctaatgccttataattagcatataatgagcagtgaggatgaccagaggtcactttcattgccattttccatttggtgggttttggccggcttctttacctcagcctgctttatcagcaaggtctttctgacctgtatcttatgtgacctcctatctcatcttgtgatttagaatgcctaacctgcgaatgcagcccagtaggtctcagccttattttacccagcctctattcaaaatagagttgctctggttcagatgactgataaattgattgaatattgcttaccagtggtttgagcttccttgctgtacttagctagtgttttattaagtaaggctatgtttgtactaggaacactaatttctgaaggggatataaatttttccagtttatatgagcagcacttagtggtcattaaattggatactactacattaagaaactaccattgcagaattctctatgagtatggcattataatccagattggtttaaaatgttagctaaactgaatcaaagaaactgtactgagttcctattaagcagctaacttgtttatgttcaattgttgcttagaagcctttgtattctgtttgagttgttaaaacttcagacaaactaaattcaacagagtttaactgaacaaagaatgatttgcagatcagcagcctctggaactagaataggttcagagtgactctggggtagctacatggttggatagtatttgtggacagaaacagcaaagtgacatacagaaaatggaagtgaggtacaggccaggcccagtggcttacacctataatcccagcactttaggaggccaaggcaggaggattgcttgagcccaggagtttgagaccaccctgggcaacatagggagaccccatctcttaaaaaaaaaaaaatatatatatatatagatagatagatagatagagatatgcaggtgtaccactcatgcctgtggtcctagctactcaggagactgaggtgggaggatcgcttgaacctgggaggttgaggctgcagtgagctatgatcacaccactgcaccccagcctaggtggcagagggagaccttgtctcaaaaaaaaaaaaaaaaaaacaaaaaaaaaacagggaagtgaggtgtagaaagagctagattggttgcagcctagtgtttgccttatttgagcagttggctgcctatgactggctgaaactgggctgctgtgattggctgaractgggctacttgttacaagagtaggttaaagtttgtttgcacatccagttaggttacaggtcactagctatggaggaacatttaggctaaacttaaaatatgtaaggaggcagctttaggctaaacttcttataacaaggtgattagagctaagcttagggatctcttcatctcttagacagtattagaatccttcctgtttaaagttccagctaaaggatttttttttttacatgaccccctatttgatgcacttaagagttaagaatgtgggcttcagagtctgagtacgttggttgaaatctcttttccaccatttgctagccatgtgacttcacgtacttttcttatttagcaaatgaaaataactgtcatacctacctccggattgctgtgaggatgaaatgagatcatgggtatggagaatgtgtatttcagtgtctggcacattgcaaatacttaaaaaagttagtaattgttattaatatttttccttttcaatagccatgtatggtactgtgaacccagaaaatctgagacaggtcttagttaattcagagagtttattttgccaaggttgaggatgtgcccatgacacagcctcaggaggtcctgatgacatgtgcccagggtggtcagggcacaacttgattttatacattttagggagacatgagacatcaatcaatatatgtaagaagtactttaattccatctagaaaggcaggaccactcaaagtggggccccccttcaggggcttccaggtcacagataggtgagagacaaatggttgcattcttttgagtttctgatgagacttccaaaggaggcaatcggaatatgcatctatctctgtgagcagagggatgactttgaatagaatgggaggcaggtttgccctgaacagttcccagctagaaggagcccaagatattttcctttcacatttccccacttttcttttttaaaatcatttggagaaagcattttagaagaaaatgaatctctggtctcaagtttcatctgatctctcatggttaggatggtttattcctagttagttaggtcctgaaagctcattcttagcaggttgtgaagtctcatgtcctgtgaagagaaaatggggggaggaagggagaaaaacaacaacaaacaaaagaacaatcctggaaaaatcgatattggccacattactctgaagtccacacattagtaggcaggtatgaaagtggcttatgtatgtaaataggttgctattattttcttctgaagtgtaagttgtctggcttcagtttgcagggctttaagaaagcacagcttagttttcagtgactccaaattaggaaaaatggaaaaaaaaaaggaaaaaaactgaaaacattattttgaagacttatagccaagaaaaattagaattcagttcaaactgtagaaaataataaaaattggaaaaacattaggcaagactagactccaacaacaggtttactatagttttgaaacataatttttctctctctggtttcccaattttgccaaagacaagtcacgctaggactggtttgctttattatacttgacctaattatttgtatacagtgcagcaagaataatttttttttacatacacttttaaattgctttgatggaacttgttccataggaggaatctcagataagactttctaaagctgagccatgatttgtgtcatcaaatacctatgagctgggtgaatttcctcacctctttaggttccaagataaacctggggcttctgggactgtcagaaagtgacattctttacttaccacaggtcagaaaccctgtacatggactgtatacacaaaataygaggccagattttccaggggctttactggctctatatgtcacgtttgattccttaaaggaaagcactccattccagtcaaagccttggtaaaataaccagtttctccaattgtgtcctgctacaaatgaaaacacagtcttacagcactgatgcaaataactgtattgccataagaatactcataaatagtttccagattctggagtaatcaggtagagagaaacaaatatgttccaaattttgttcataggagtatgctgaattgttaaaagctgtcagtagctcaaaagaaaagttttgagactctgaaaaacaaaacaaaggatcagcaaacattttaagcaaaaattcagtccatgcagttaattcctgttctgcttgatactcatgaacattttagctctccgtgagtcctggaagtttttcctctattctgatatcacaatctctaaagttatgagaaacctgcattcaagagcacctgttagagttttgtagctgattataaaatcaccttctaaagaggaccaaaacaagacaacaattgtctgtggatgacaaaaagttttagggcagccatagtcaaagacaattgacaaggaaatttgttacctctgtgacacacaataattttatgattattactgataatgtatactaagttatatcagaattataggagtttcacataattttggaacacataccaataacatatttatacaaatacagcccaaaggaaaccaaacaccatttcatatttgacaatgcctcctgtataatttttggaccagataagccaaattatgttattttttggactttagggaacctctaatgtcttaaaggattaattaggtcagaaaaagacataatttattatttgatttgggaaagtttgtcaaatatcaaaggttttaaacacttgatatcacaaaataggatcacaggtctttgtaaaataagtcatccatttaaccaaaatgataaggatttcaaaaacaaaaaggtgaaaacctttatttgttgagagagaagaattaattttgcaaacaataagccttaataaaaccagcatgaagccaattaaatttgttttttaaaattttataaataatctataagattttaatcttgaccgtaagatatagcttccataagccttttataacctttattaaggagttggttaatgcttcaagaaaacctaactaatctgacacaggggcccatatgctggtcttgcatcagtgtgcctttgacattaataattaatttatagagaaactgaacttattttatctttcaaaattggccgttacaatcttacgtgcccacctcttccacaatagtccctgggctttgaggagttgaatagctttaactttttgccttgtgtgtcaggaatgcagtttattttgatgggcatcttctatggggcctgaagacaaggctttaattgcagtcagtgtttaagatttagcaagactggccggggatggtgactcatgcctataatcccagcactttgggaggccgaggtgggtggatcacctgaggtcaggagttcgagactagcctggccaacatggtgaaaccccgtctctactaataataccaaaaaaattagctgggtgtggtggtgcacacctgtaatctcagctactcgagaggctgaggcaggaaaatcacttgaacccaggaggtggaggttgcagtgagccgagatcacaccattgcactccagcctgggcaacaagagcaaaactccattaaaaaaaaaaagaaaaagatttagcaagacttggtgtcctgttttagatccaggactcaaagccctgtaactcaatgtcacaaggactttaaaagcacatacaggaagatacatggaggctgaatcacttgaacctgggaggtggaggttgtggtgagccgagatcacacctttgcactccagcctgggcaatgaatgaaactccgtctcaaaagaaaaaaaaaagaaaaggttttgtgggtttttttgtttgtttgtttgtttgttttgagatggagccttgctctgttgcccagactgaagtgcagtggcccgaccttggctcactgcaacctccgcctcccaggttcaagcgattcattctcctgcctcagactcctgagtagctgggattacaggtgtgtgccactatgcccagctaatttttgtatttttagtagagacagggtttcaccatgttagccagactggtcttgaactccctacctcaggtgatctgcccgtttcagcctcccaaagtgctgggattacaggtgtgagccaccgcacccagtcaaaaaaagttttttaatctcagtttttttatttctaagcaaaccaaaacttaataataatatggcaacttggtcatattaaagttttttggcttttaaaattttttttatttttatttcttttttttttttgtgagacagagtctcactctgtcacccaggctggagtgcggtggtgtaatctcagctcactgcaacctctgcccccagggttcatgcagttctcctgtctcagtctcctgtgtagctgggattacaggcgcctgccatcatgcctgagtaatttgtgtatttttagtagagacagggtttcactattctggccaggctggtcttgaactcctgacctcaggtgatccacctgccttggcctcctaaactgctggaattataggaattataggcgtgagccactgggcctgcccatttttcttttttgtctttttttttttttttttttgagacagagtcttgctctgtcacccaggctggagtgcagtggcacaatctcagctcactgcaagctccacttaccgggttcacaccatcctcctgcctcagcctccggagtagctgggacaggcacctgccaccacgcctggctaattttttttttttttgagatgaagttttgctcttgttgcccaggctggagtgtaatggcataatattggctcactgcaacctccgcctcctgggttcaagtgattctcctgcctgagcctcccaagtagctgggattagaggcatgtgccaccacgccaggctagttttatatttttagtagagacggggtttctccatgttggtcaggctggtctcgaactcccaacctcaggtgatccgmctgcctcggcctcccaaagtgctgggattacagatgtgagccaccgcacccggcctctggctaattttttgtatttttagtagagacggcatttcaccatgttagccaggatggtctcaatctcccaacctcgtgatctgcttgcctcggcctcccatagttctgggattacagccaccgcacccagcctctggctaattttttgtatttttagtagagayggcatttcaccatgttagccagggtggtctcgatctcccgacctcgtgatctgcttgcctcagcctcccatagttctgggattacatatttctgggattacaggcctcccatagttctgggattacaggtgcccggcctcttttwaaaaaaaaaaatatatatatatatatatatatayacacacacacacacacacacacacacacacacatatatttattgcgacttatactgaccattcgtgacatgcttggactttctcatttgtcttgaacatccatccctccttctttttttttttttttttttttttgagatggagtctctctctgttgcctacactggagtgcagtggcgcgatcttggctcactgcaagctccaagctccgcctcccgggttcacaccattctcctgcctcagcctcctgagtagctgggactgcaggctgccaccaccatgccccactaattttttctatttttagtagagatggggtttcgccatgttagccaggatggtcttgatctcctgaccttgtgatccacctgcctctgcctcccaaagtgctgggattacaggtgtgagccaccgcgcctggcaacatccctccttcttaaacaaccagtcattttattttaggactaaatttaccatacaatattctttctcgtaaaattatttttctttaagctttcttaccacacatacaaaaatcctatttatttttaaaactttctttacatctctttttattttctggttccttttaccttgttttatatgtaacctttaagtaagctgtgaattagacaaaacttgttcacccttttttaaaaaggacacatccttctgtttttttagcaagaatgttttcctacaatatatatttattggaaaatacccaaataattaaatacctattatttaatttaatataactttatattctaaattatgaccagtttatctacaggtatttatcccattacatttacctaattattttatttgtttacgtacattatttatgaaaactatgatagtcataatttaaagttatgaaaccaccattgcaaaattgtaacagtgaaaaatgatttgacctaactaaacttcatcttgctcttaacctccaatctgtccttgttcattcctgggcataggctgaactaactttgggaggaacttatagtttagctttgaaacaaagatgataacagtcctttcccaaaagaaacctccttattgcctgtggactagactgcctaaagccatgaggttagaagttatggtaattttaccatatttaagatgcagctattttcattaaaccagtattaatgtcttatttattaaaaattacacaagcgaagatcattctgttttgggctgggtttaatgttttgtaacccccgtgccatattttgacaccttaatgtatctggcagagaactatgaaactgcttgattaggccacgcatggtggctcacgcctgtaatcccagcactttgggaggctgaggcaggcagatcacaaggtcaggagtttgagaccagcctgaccaatgtggtgaaaccctgtctctactaaaaatacaaaaattagctgggcgtggtggcacgtgcctgtaatcccagctactcaggaggctaaggcaggagaatcacttgaacctgggaggcagaagttgcagtgagccaagatcgcgccactgcacttcagccctgggtgacagagcgagactccatctcaaaaaaaaaaaataaataaataaaagaaattgcttgattaataaatgcaagcaaaaatgaatgctggcaattgttaagacatttctaatgtttcccaataattttaaaacttgctttttattaaagagtctacttaagttacatgaacttgaaaaagcatttgagtagtcttttttagtatctgatttaagtgcttttttaaagccaattacctagagctcttttatatgtatttttagtagtgaaacattgtgtacacaacacatacacagacatataggcatgccaatagaagtacattttgtagattcatagaaaccttttttttcctatcagactttcagattcttttttttttttttttttttgagacagagtctcactctgtcgcccaggctggagtgcggtggcgtgatctctgctcactgcaagctccgccccctgggttcacgccattctcttgcctcagcctccccctagctgggactacaggcgcccaccactacacccagctaattttttgtatatttagtaagatggggtttcaccatgttagccaggatggtctcgatctcctgacttcgtgatccacccgccttggcctcccaaagtgctggaattacagctgcacccggcctcagattcttgataacttgttttacaaccctgggcagctgtcagctacgtagccttaaatttgcatgttaaaggaaccaactcaggtgaaagtcaaatagcaaagtttacattataaggtgcggagagaaaaagtttgggttatagaaattttaaaggccttttaaatmcacacacacacacacacacacacacacacacacacacacacacacacacacamacacaccctgacaccctatagcttttacttcagaactttttgccactagataaatagaaatttactggcttgcaaaaatatcttgttggatctaaacagtggtttttatcttaatagaaaaataacagcagattgagagcaggcagaaaagaaaaaatagagaaaaagagtacttaggaactctgtagtttgcaggtcaaccttaggcctccttttccttaatgtgaatgtgcacagagaccatattatttccattttacataaactttggcaagtagaggtgccataaaacctatggaatgctcaaaaggggtcattctccttttctcctcattcttcgattatttgcttcctgccctttttcttttttttcttaaaagggggaactgagcttgtagcctagggtttttgtgtggtggatcaatatgtgctccttgtgggcaggactacacagtatgtcagcactgagtcgcttccacccttttacatgtctcagtttctctctccagaggtctgtgacctcagagagggctcagaacactgggtgatcagtccttatatgcgattcctggacgagccattttaaaaattaatttctgttggggatttccctgcaagcctgctgcatgtcattgtcgggggcggaacttaacccccagacacccccaggaggccaccggtcacccaggggtgccttctggctgggaggagcaaaacaccctttktcttctcaactgacaaaactcagtctctcattaacatatgaaaacagcagttcaatttctcacacaaatgcacacagaaaaactgaattaacattaaatttgagagaaaaagcaatagggaagagcctttagaatgcatctctgaactagaattaggttccttaacaacttcagacaggaacaaatagcaaaaacaaacacacacacaaaacagcaataggatcactgagcgctccaatggtaaggaggaattacgaccagttagttgttaatattaactttaaccaagacaaaccccagttcagttacttacctagggatgagtctcaggctgaagactggtttctaccagcaagaaagcaaaaaaaaaaaaaaaaaaaaacaacctcatctcaaactccacaaaggagttactactgccttccatcattatggaagcaggaaaatcacttgccttgtgctggaagcaggtaaaactccaaaaaaaaaaagaggagttatacagcaaaataaactttagatctcgatcaaattttgggagatcagggattctctggaaggagtgctctcagatcccagcaaatcgtcctattggtttgtgccataaaggtagctgatgctggtaccaagcaccaataggaaatttgtcaaaggtcaagggcatctccactcagaatacccccatggttaccaaaatgtgaacccagaaaatctgagacaggtctcagttaatttagaaagtttattttgccaaggttgaggtgtagcaggacaagctgcggacaaaacccctcagacaccaagatagtgaagggagtggctttcatcagctgggagcatcggcaggctagtgtcttaaaatccgagctcttcaggtgctcaacttctgtcccttttaaggactcacaactctaagggggtccacgtgagagggtcatgatcgattgagcaagccagagggtacgtgacaggggctgcaagcaccggtggtcagagtgaaacagaacagaacgggaggtttcacagtgtctttccataccgtgtctggaatctatagataacatcagttgctaggtcaggggtcgaattttaactaccaggcttaggtcaggcaggcccaggcctggtttccggtctggttcctaggcaccgggctacctgtctttagtttcgcttctctttccttttctgagtataaaacaatataaaacaatatgagagggtctctctcttccttcagaggatgtgcccatgacacagcctcagaaagtcctgaagacatgtgcccaaggtggttggggaacagcttagttttatatattttaggaagacatgagacatcaatcagtatatgtaagaagtacattagttccatccagaaatgcagggacaactcaaagcaagcaagctctcccaccccctcacccccctcccccgccccgccgttaccctgggggcttccaggtcacaggtaggtgagagacaattgataacattcttttgagtttctgaagtctttccaaaggaggcaatcagaatatgcatctatctctgtgagcaaagggatggctatgaatagaataggtagatttgtcttgagcagttcctagcttgaaggagcccaagatattttcctttcacagtaataggctaaaaattacttggggttttgtttgtatgtttgttttgaggtggcgtcttgctatgttgcccagactggagtgccgtggcacaatcttggctcatcacaacctccacctcctgggttcaagtgattctcttgcctcagcctcctgagcagctaggattacaggcacctgccaccacgcccagctaatttttgtatttttagtagagacagggtttcaccatgttggccaggctagtctcgaactcgacctcaggtgatccgcccacctcggcttcccaaagtgctgggattacaggtgtgagccaccgcacccagcctaatttttgtatttttagtagagatggggtttcaccctgttggccaagctggtcttgaactcctgatctcaagtgatctgcagccttggcctcccaaaatgctgggattacaggcrtgagccactgtgtctatccaaaattacttgcttttaaagtatgatttggacatctgtgtaatattgtttcactcaaagctgtcatgtgagaaatagccacaggatgggcaaaatgttaattatattagaaataaaaatgtacttcagatttgtgaagttggcatatatagtgttttctacaacattttcaaaggaatgaaggattgtgacattacagcattttgtaatatataaaaagcacctgaaaggagcatagttcctctctccctatcaattgtcaagtatttacagagggtcagtttttttcctctcattttaacccacgagatttacaaattrtgatagtaaaatagtggttctcatatacctgtgtgtgccccttctgaggatccaatctggcagcttgcacaaaagagtkgtagttattgctgactgctgactcttcggggtagcaattggggtgctgaaatcccagttactgaaaacgagaagattacagcgagggagcctaacatgttaaaagtgtttgctctttttcacatctgcttttcatttgcttatcatttcagatgtttattcagcatcaagcttgtgcatggcacaggaaacagagagatgaatcaagtggcctttcttaggccaccagagagagaccacctgtggacaggtcaagtgcaaccaagggttctaagagctatggcaggaggctccagacaattctgggctttctcatgatctaatttcttactatcaggttgagaaacactcacctgatgtagacatgcagcagtagaggatgcttgtagcagctgaggacaggtctgaggacagatcattccagcagactccattcaacatgtaatgctttatagtgaatgaggaactgttacctctttacgtcttatcttataagtgcctagagatgcaggtagaatgagaatctactcattctggaggtgagaaaactggggcccaaaggggataagttcccaaatcaaacagaggaagtaaatggtggcaacatttttactccaaataagttgctccaacatgcagtaactataaaactaacaagcatttcatttgtcatgctggactaccttagtttaaggaatctagatttatgaaaacccaggtttactgattcacccaagtttaaatggtgaatatttgcattgcagaaggattttccaggctgggcatggtgactcacgcctgtaatcccagcactctgagaggccaaggtgggtggatcacctaaggtcaggagttcaagaccagcctggccaacatggtgaaaygctgtctctactaaaaatacaaaaattagccaggcatagtggtgcgtgcctgtaatcccagctacgtgggaagctgaggcagaggaaccgcttgaacccaggaggcagatgttgcagtgatcccagatcacgccactgccctccagcctgggtgacagagtgagactctatctcaaaaaataataataataataatattttccaataaaagtaggtattgtaacttggagtgtacagatgggcttcaagagttttgtaggtctcctgaaatcatttccacaattttgtatatacttaccttttagcagacatagtaataatcagatttccaaaggaatctatacagagaattggtagagacccccaccactctagtggattaaaaaaaatcaacctgtaggccatgcacggtggctcatgcttgtaatcccagcactttgggaggccaaggtgggcggatcacgaggtcaggagattgagaccatcctggctaacatggtgaaacccaatctctactaaaaatacaaaaaattagccaggcatggtggcgggtgcctgtagtcccagctactcaggtggctgaggcaggagaatggcatgaaccccggaggtggagcttggagtaagccgggatcgcgccactgcattccagcctgggcgacagagcgagacgccgtctaaaaaaaaaaaagaaaatcaacctgtaaatttttaaattatagtacttaatggagtgcttctcagtaactcttcagaaaacgtgtttaaaaagaaaacatttaaatgcaggtttatgggaaaatgttacatttcttagtatgttccatgtggtagaatattgtactgtgtagaagcatctcaattaatgaaaaggggaattttaaaaggtcacttcattttccattgctggataaggagagataaagaaatttaaactacagatggttcccaacttaygatggttctactcaaccatttttcaactttatgatggtgcaaaagtcatatgcatgtagaaactatactcaagtacctatacacccattctatttttcactttcagtacagtattaataaatcacatgaaataatcaacactttattataaaataggtttatctgagatgattttgcttaactgtaggctaatgtaagcattctgagcatgtttaagttaggttaggctaaggtatgatgtttagtaggttaggtgtattaaatgtatttttatttatggtattttcaacttatgatgggtttattgagacaatcccatgtaaattgaggagcatctgtagttgatttggttgcccattaatgttgggcacaaggaagaataataatttatccattttcttcgttcgttctctttactgtttcttatattacctaacaccccctcagatagataacccagcagttgtggtaataatatcatttaactagaccaaataaaaggcctcctaacctacatataagcctgggcactgtagcatagtacatgtttgtaatcccagcactttgggaggctgaggcaggcagattgcctgaactcaggagctcaagaccagcctgggcaacatggcaaaaccagatctctacagaaaattatctgggcacactggtgtgcacctgtagtcccagctacttgggaggttgtggtgagaggatcatttgagccccggaggtcaaggctgcagtgagctgagatcacactactgcactccagcctgggtgacggagtgagaccttgtctcagaaaacaaaaacaaaacagaaaacaaaaaacatgcatatacctatttaatcctttctgcagtcttataaggtagatattagatacattttgcagatgaggaaactggcagaaacattaagtaacttgttcaaaggcactcacttagtatgatgttggtatttgatccaaggtctgcctggttccaacaatagtttgctatatcaagcatttgaaatggtcattcacacctcaaatttatttatatctcagtagaaaaatggcagctagcaacttgatcttaagcaaaaagcaagtcagacttgaatttaaagagaaattattttatggaaaaaacaatgaattgcaagaaacaaaatgtggtttcttactgaataagaaggaagatgtggttggacaactatagcaactgaccccaggccaagggtactggttagtgaggaaacgttaattcttacaacaagaggaaagttttgcaatgatctactgtctttttctcataaacttggaattaaggatatttcctttttccccaaacattttttatttaacttggcaaatataatgtcttaaaaggcatctcttcttgaaagtttctaattgccgtgcactactatgaagacatttggataggattatttcagagacataatttctgtgtgattagggttttttgtctattttatcaagattttaatttctagcagtgggataattatattaataagttcttgggaaatttgtggcgcttagagtctgttgaggtgctgaacagagctgggggtcttgctgtagccagtgatctcaggacattttaaacgctgccactgttgtaggccaaaaccagtgtgccttatatcagtgaagactctgaagccttgggctatggcagaacttggggccctgaagtacacatggaagtcagcccactgaacatgggctgacaaaaagagtggagaaataagaatatatatttggactacttctggttccaaagtagcaacatagaagcaagctgacttcactcacctccacagacaaccaaaaacaaatgtatagtgctgagattatcacgagaattgtcccagaactcaaacatgaagatgagacagttctcgaggccatggagaaatgaaaaagctccgagcagatggtaagagaattggacttccatatcccttctgcctggcaccaagtgtgaggaaaatttccctgcaagtcaccatttttgcactggaaaaagtaagactgagatgaacaaccaacatccctatcatcttggattccctagcaggagacttgtccctgccttaacccacaggaagcatctcaagtgcctgaagggagaaatccctgaggacaggcagagacaaaggtgggaggcaggtctgccatccccagccctggaaactctgctctgtaattcagccaaaggagatggcaaatcataatggctgctcagcaacacaacactgtaggaggtttcacctacaggtcccttgggcacagtgtgggaggatcaagaattcaaaataggccagcaccatggctcaagcctgtaatcccaggactcagggaggctaagacaggaggactgcatgagcccaggagtttgagaccagcctaggtaacatggtgagatagtgtctctattttaaaaaataaaataatttttgaaatttattttatactttttgtagagacaagttctcaccatgttgctcagactggtgtcaaactcctgggctcaagcaatcctcccacctaagcctcccaaaacactgggattacagggagaagccaccatgcccagccctaaaaaataatttttaaaaaaagaattcaaaatagtagtttcaaggaaactcaatgatctccaagataacacacacaaaaaaaattcagaaatttatcagagaaacttaagatattgaaataagaaacagaagtctcagaactgagaaatacatttgctaaactgaaaaattcattagtggctttcagcagcagaatggatcaagcagaggaaagaatcagtgagctgaaagatgatttgaaaatacacggccrggcacagtggctcatgcctgtgttcccagcactttgggaggctgaggatggatcactttaagtcaggagttcgagaccagcctggccaatgtggtgaaaccccatttctaccaaaaagtataaaaaattagccgagtgtggtggtgtgcacctggaatcccagctacttgggaggctgaggcaggagaatcgcttgaacctaggaggcggaggttgcagtgagccaagatcgtgccactgcactccagcctaggcgacagagcgagattgtaaaaaacaaacaaacaaaaccagaaaatacacagaggtaaaaaaaaaatgatgaaaagccatgaagattgcccataagatgtagaaaactacctgaaaaggcccaaactaagaattactggtgttcaagagagagttgagcaagagcaaagggtagaaagcttagtctaagaaataacaacagaaaactttacacaacttaagaaagatataaatatttgggaacaggaaaatcagagaacatcagatttgacccaaataagaccccaaggcatataataatcagactcttaaaggtcaacaaagagagaatcctaagagcagcaagaaaaaagaagcaaataatataaaggagctccaatttgtctggcaacagacttctcaatgaagaagcctcatgggaaccatgatgcaaaaaaagcatgcaggaaaccatacaggccagggaggtatggaacgatattttcaaagtgctgaaagaaaaaaaaaacctgccattcaaaaatactgtgtccagcaaaattgtccttcaaatatgaaggagaggtaaagtctttcccacataaaccaaagttgagagaatttaccgccactaaacccatcttacaagaaatgctaaagggagttcttcaaacagaaagaaaacactcatgggcaaataggaaaacatttgaatgtctaaaacccactgataaagttaagtacgtggacaaacccagaatactctaatactgtaattgtggtgttcaattcactcataagtctagtatggagcccaaaagacaaatctatcaaaacaaaaataggtatagcaacctgttaagaggtagataatataaaattatgtaaattaagacaactaaaagtcaaaatgtggggggacgaggataaagtgtagagggrgttttttaaacatatttttctttgtttctttgttatttaagataagttgtcatctctttaaaatgacttattacatctgtgagatatttttttgtaarcctcatgggaaccacaatgcaaaacacttgtaataggtttactaaaaatataaagcaacaaaacattctaccagagaaaatcacttaaccacaaaggaagaccagaagaaaggaagagaggagttgcaaaacaaccagaaaataaggaacaaaatggcagtagtaagttcttatcaataataacactgaatgttaatgaactcagttctccaattaaatagcatagaattttctttagccaggcatggtggctcatacttgtaattccagcactttgggaggctgaggtgggaggatcactggatcacttgagcccaggagttcaagaccagcctgggcaacataacaaggctccatctctatttaaaaaaaaaaaaaaaaaaaaaaaaaaaaactaaggcatagagtatctgaatggataaaaagtccttggaaaaggggcaaggtgtctggtatggcagacgaggaggctggtaaatctcctagaaaaccaacctattaaaaaagtatgaaacaggatgaaattattaaaaacaaccacttcatgggtgtagaaattgaccaaagacatgcaacaaatcaagaagcatttctttgtccrggcatggtggctcatgcctgtaatcccagcactttgggaggctgaggcgggtggatcacctgaggtcaggagtttgagaccagcctggccaacttggtgaaaccccgtctctactacaaatacaaatattatccgggcgtggtggtgcatgcctgtaatcccagctacttgggaggctggggcaggagaatgtcatgaacccaggaggcggaggttgcaatgagccgagattgcaccattgcactccagcctgggcaaaagagcaaaactccgttttttaaaaaagcatttattcatgaaaaaacatggaactttgagtaagagcagtaggagtctgtgacagacatgccgagagctataataaaattaccacaaatttagtggcttaataaaccacatatttattattttatagttctaaaagttggaagtcctaaaattaagccatcagcagtgcttgatttcttctggagggtctaggataactcccctatctcgagattcttaaattaatcacagctgcaaagtttctttttaccatataactgaagtaacatgcccactgattctagatattaggattagaatgtggacatctttgagaggtattatttaggctaccacaaacattaatatacatatccaagaaactttgtgagctccaagtaggacagacacaaagagatccaccacatctagatacatcgtagtcaaactgttgaaagccaaaggcataagctcaaaagcagcaaaagaaaaattacgcatcagatacaagggaacaacagttatgtgattagtgtctggcttctcattataagaaatggccgcagggctttgaatttacagtccagcaggtaggtagcttagaagttgccacttctaggctgggtgcggtggctcacgcctgtaatcccagcactttgggaggcctaggcaggtggatcatgaggttggagttcaagaccagcctggccaagatggtgaaaccctgtctctactaaaaataaaaaattaaaaaaaaattagctgggcgtgttggcaggcacctgtaatcccagctatttgggaggctgaggcagagaattgcttgaacctgggaggcggagttggcagtgagccgagatcacaccactgcactccagcctggatgacagtgtgagactctgtctcaaaaaaaaaaaaaaaaagaagttgccacttgttcctaacaagtaaaaagcttaacaaactgaaaaatcaactcttctttgatacatcagagacatgaaatcataccgcacacagttgcccccaaaataaaagacagataggtggatacatggaatcacacttactggagcagaaacctctgtgggaaccagtcctgtggtaggaaaacatgaagtgtaattgacaaattgctggagactcagtgtggacaagtctgagagtgatttagttgaatgttgttcccactaaaatctcatgttcaattgtaatccccaacgttggagatggggtatggtggaaggtgattggatcatgaggaatcttatgaaatggtttaatgccatcctcctggtgctgtcctcgcaacagtgagtgagttttcacaagatctggctgtgtaaaagtttgtggcatctttcccccttgttctctctcgctcccackctcaactactccctgttcaccatccaccatgattgtaagcttcttgaggcctccccaaaagctgagcagatgccagcaccatgtttgctgtgaagcctgcagaaccatcagccaattaaatctcttttctttatgaattacctagcttcgggtgttgtttttttatttttattttttgagaaaggatctcactgtgtcacccaggccagagtgtactgtcctgatctcagctcactgtagcctcagcctcctgggctcaagtgatcctcctgcctcagcctcctgagtacctgagacaacaggcacatgccaccacacctgccttatttttgtattttttgaagagacgggatttcaccacattgcccaggctagtgtcgaactcctggactcaagcaatatgcctgcctcagcctcccaaagtgttgggattacaggtgtgaaccaccacacccagcccaggtgtttctttatagcaatgcaagaacagtgtaacacagaaagttataaacttcagtgggacccagtcatggggggtgctcatgctttccgtaagttttacctccaagagttctaccagcccctcacaatgaatattggagagacatccctttgtgcttccagcagagggaggggraaaaaaatcatcactttgaaatatgccagagcattctgctcatcttaacaatgcctgccctcaggagaaactattttaccagagtctaacttactttggggaagggtaatactcaacctcagctcactctattctttcatgtggggaaaattaatacccaactccagccctctctagccatcctgtcccacctgaagggggaacactgagaggcactggtgaaatttatagttcacaggctcaccaaaaaactgagacctaataggactgtagaacacttccccttcctccagcaccttaccactacgttactaaaggcctgtttgccacagttctttttacccagtgcatcctgtccaccttttgattaaaaaattacaagtcatactaaaagggaaaatacacagaagagactgaagaagcatcagaaccagagtttgatatggcaggaatgctggatttatcagaccaagaatttttaaaaatcatgattaatatgctaaggactttaatggaaaagtagacaacatgcaagaactgatgggtaatgtaaatagaaagatgaaaaatctaagaagaaaaacaaaatgctagaaatcaaaagtgatacaacagaaatgaagaatgcctctgatgggctcagtagacgggacatggcagaggagagaatctctgagctttgaggatatgacagtagaaacttccaaaacttaaaagcaaagagaaaaaagactgaaaaaaacaggaacaaaatatccaagaaatgtgagataactacaaaagatgtaacatacacataattggaatgccagaaagaagagagaaaggaatagaagcaatattttaaggaataacgttgagaatttcccccagaattaatctcagacaccaaatcgcagaacaaggaagttcagagaacaccaagcaggatgtcttagtcctgtagactgtgtaatttataaaaaaacagaaatgtcttacagttccagaggctaggaagtagaagatcaaagcactggcaggttcactgtctggtgagggcctgttccttatagaaggtgccatctaagtgtcctcacgtggcagacgggatagaatgggtgaaaaaaagggggaagggcatgtaatcccattcatgagggcagagcactcatgactcaatcacctacaaaaggtcacaactcttaatactattggattggggatacagtttcaacatgaattttraaagggacaaaaacattcaaaccatagcacaggataaagggaaaaaagactatacagacatttcatagtcaaactacagaaaatcaaagataaagaaaaagatctagaaaaaaaccagagaggaaaaatgctacctatagaggaggagagataagaattacatctaggttgggcatggttgctcatgcctgtaaatcccagcactttgggaggctgaggtgggtggatcacctgagatcaggagtttgagaccagcctggccaaacatggtgaaaccctgtctctactaataatacaaaaattaactgggtatggtggcatgcacctgtaatcccagctactctggaggctgaggcaggagaattgcttgaatccaggaggtggaggctgcagtgagccgagatcgtgacattgcatcccagcctgggagacaagagccaagctctctctccaaaaaaaaaaaaattacatctgacttctcagaaattatgcaaatgagaagagaatggtgtgaaatatttaaagcgttgagagaggaaaaaaaacccaccaacctggaattctgtaccctgcacaattatccttcaaaagcaaaggagaaatagagactttctcagaccaaaaataaataaatgaaattggaggaatttgttgctggtagacctgccttgcaagaaatgtaaaaagtttttcggagagaaagaaaatgatatgagtcagaaactctgatctacataaaagaacaacattggaaaaagaataagtgaaggtaaaagaaaagcattatttttcttattcctaattgacctaacagataaaagtttgttcaaaataatcatagcaacaatgtattttattatgtatgcttttatataccaatacattatgtatataaatgaacataaatatgtgtttatgtatttttagttataagtgaaatgaatgacagcaacagtgtaagggaagagagggaagaatcaggagtattttgttattatatgatacttgcaatgcctgtggagtgatatagtgttatttgaaagtggacttggattcattggaaatgtatactgtaaactctagggcaaccactaaaaaaagtttttttaaaaaaagaagcatagttgataagctatgaagggagagaaaatagaatcatataaaatgctcagttaaccacagtgggcagaagaactgtggaagacaaaaagaggagcaaagaacaagggtaacaaatgaaaaaaaattaacgaatatggtagctattaatccagctatgtcaataatcactttaaatgtcagtggttttgtcagttacatcatttaaaaggcagagattgtgagagtttatcaaagaataagacccaaatatatgttgtctaccagaaaccaactttaagtataaagacacatatagattaaacataaagagatgaaaaaagatccaccatactaacactaattaaagaaagtgggagtagctatatttctacacagagtagactacagagcaaggaaagttatcagggttaaagagcattacattatgaccgcagatcaatcctccaataagacaataatctttaatgtatatacacataatagagcatcaaaatatgtgaggcaaaaactgatggaactgcagggagaaagagatgaatccactattgtatttggagacttcaatgctcctttatcagaaagacagatttggcatgcagaaaattagtaagaacatagttcaactcaacagcggtcaattggatatagttaacatgtataaactactttgtccaacaacagcagattatacattcttcccaagtgaatgaaacattcacttagaccacattctaggccacaaaacacaccttaataaatataaaggaacagaaatacattgtctgcttccagaccacgatggaattgaactagaaatcagtaacagaaagataactggaaatcccccaaatagttagtgattaaacaacatacttgtgaataacacatgggttaaagaagaaatctcaagagaaaactgaaaatattttgaagtaaaagaaaatgaaaaccttaccaaatttgtagaatgcagcaaaagcagtgcttagagggaaatttatagcattgaatgtatgtattagaaaagaagaaagatctaaaatcaacaatctaagtttatactttaggcaactagaaaaagaagagaaaattaaatccaaagtaagcagaagaaaaataataaaaattagagcagaaaccaatgaaattgagaataggaaatcagtacagaaaaccaacaaaactaaaagctggttctttgaaaagataataaataaaatcaataagcctctagtccagctaagaaagttagctaaaaaactaaggcacaaatgactaatatcagaaatgaaagcaaggacatcaccacagagcccatggacatcaaaagaataataaatgtagccgggcgtgggggttcacgcctgtaatcctagcactttgggaggcagaggcaggtggattacctaagatcaggagattgagaccagcctggccaacatggtgaaaccacatctctacaaaaatacaaaagttagccaggcatggtgttgtgcacctgtaatcccagctacttgggaggctgaggcaggagaatcgcttgaacctgggaggtagaggttgcattgagccaatattgcaccactgcactctatcctgggtaacagagtgagactccatctcaaaaaataattataataaaaaaaataagccgggcgtggtggctcatgcctgtaatcccagcactttaggaggccaaggcaggtggatcacctgaggtcaggagttcgagactagcctggccaacatggtgaaaccctgtctctactgaaaatacaaaaattagttggacgtggtggcatgcacctgtcatcccagctattcggggggctgaggcaggagaatcgcttgaacctgggaggtggaggttgcagtgaactgagatcatcccattgcaccagctagggtgacaaraacaaaattctgtctcaaaaaaaaaaaaaaaagaatgctatgaataactctgtgcccatttcttgataacctagatgaaatagaccaattccatgaaaagacaatctgccaaaactcacgcaataagaaatagacactctgaatgggcctgtatctattagagaaatggaatcaataataataactttcccaacagaaagcaccaagcccagatagattcactgatgaattctaccaaataattaagaaagaattataccaattctctacaatctctcccaggaggtagaagcagagagaatactttctaactcaacctatgagacttccattaccctaataccaaaaccaaagatattacaagaaaataaaaatatgtaccaatgtctctcatgagcatagatgcaaatatcctcaaaaaatattagcaaattgaatgcaataatgtatgaaaatgaccaagaccatgaccaagtgggatttatccaagatgtgtaagtctggttcaatattcaaatcaggctaggcacagtgctcatgcttgtaatcccagcacgttgggagggctgaggtgagagaattgcgtgaggccaggaattcaagaccagcttgggcaacagagcaagacctcatctctacaaataataaaatcagccaggtgtggtagtgtacacctgtggtctcagctacttaggaggctaaggtgggagaactgcttgagcctgggcagttgagggtgcagtgagttgtgatcataccactgcactccagtgtgggcaagaaagtgagaccctgtctcaaaacaaaacaaaactaatgtaatctggctggaggtggtggctcattcctgtagtcccagtactttgggaggcaaaatggtgaaaccccatctctacaaaaatgacccaggtgtggtggcacactactgtagtgccagctactcaggaggctgaggcagaaaaattacttaagcctgggaggtaagggctgcaatgagctgagattgcaccactgcaccccagcttggttgacagagtgagaccctgtctgaaaaaaaaaaataataataatccatcacatcaacaaactaaagaggaaaaaaagtcacatgatcatatcagtagctgcagagaaagtatttgacaatatctatctctgattcatgattaaaactctcagcaaatcggagtagaggggaactccctcaacttgataaatacttaaaaaaaactacagccatcatacttaatggtgaagaactcagcttgcccactaagatcaagaacaaggcaaggatgttccctctcaccactgctttaaaaaaaatttttcccacccaaatctcatattgaatcattactgttttttaacatcatactggaagtcctatatagtgcagtaagacaagaaaatgaaataaaaattgtagagattgggaaggaagaaatgaaaatgtatttgttcacagatggcaatcatttatgtaaaaactctgaaagaataagaaactaagcaaagttgcaggatacaaggttaatgtataaacatgaatcacttttctgtataccagccgtgaacaagtagaatttgaaattaaaaagacattaagtatgaacaggttttttaatgaggcagactataaaactgtgatgaaatgtatcaactaaatagatattccatgttcacagatagaacaactcaataatgtcaagatataatttcttcctagcttatctatggagtcaatgcaatcccaatccaaatcccagcaagtcattttatggatattgacaaactgattataaagtttatgtggaaaggcaaaagaccaagaataaccaactcaatattgtrggagaaacaagttagaggactgaygctacctgactccaagacttagtataaagctacattaatcaggacagtgatattggtgaaacaacaagtagatcaatggaacagaatagagagcccagaaatagactcacataaatagagccaactgatgtttgacaatggagaaaagatagtcttttcagcagattgaaacactatctgcatgcaaaaaaaaaaaaaaaatctaaacacagacttcacaactttctcaaaagttaactcaaaatggatcatagacctaaatgtaaaatgcaaaaccatgaaactgctagaagataacataagagaaaatttgatgacctcgggtatggtggtgacttttgggcatgatccatgaaagaaataattgataaactggacttcattaaaattaaaaacttctagtctgagaaagactgtgtcaagagaatgagaagacaaaccacagactagtagaaaatattttctttttctttctttcttttttttttttttaaagacggagtcttgctctgtcgcccaggctagagtgcagtggcgtgatcttggctcattgcaacctccgcctcccgggttcaagtgattctcctgcctcagcctcctgagtatctgggattacaggagtgcaccaccacgcccggctaattttttttttttttgtatttttagtagagacggggtttcactgtgttggtcaggatggtctcaagctcctgacctcatgatcctgctgccttggcctcccaaaatgttgggattacaggcgtgagccaccgcacccggccaatattttcgaaagacacattttaaaggactgttatcagttggaatggtggctgatgtctataatcccagcactttgggaggccaagatgagaggatcactgagctcaggagtttgagaccagcctgggcaagatggcaagaccctgtctctgcaaaaatttttttaaagttagctagtcacagtggtgtgtgcctatagtcctagctacttgggaagctgaggcaggagaatcccttgagaccaggaagttgaggtggcagtgagccactgcattccagcctgggtcacaaagcaagaccctgtctcaaaaaaaaaaaaaaaaaaaaaaaggactattgtctaaattatacaaagaactgttaaaactcatcaatgaaaaatagggccaggcatggtagttcatgcctgtaatctcagcactttgggaggctgacgtggtggatcatttgaggtcaggagttcaagaccagcctggccaacatggtgaaaccctgtctctactaaaaatacaaaaattaggcctggcgtggtggctcacgcctgtattcccagcattttgggaggccgaggtgggtagatcacaatgtcatgagttcgagaccagctgggccaacatggtgaaaccccgtctctactaaaaaatatacaaaaattagccgggcatggtggtgtgggcctgtaatcccagctactcggaaggctgaggcaggagaatcgcttgaacccaggaggcggaggttgcagtgatccaagatcatgccagtgcactctagcctgggygacaaagttagactctgtctcaaaaataaaaaaatttaaaaaattaaaaatgaacaacacaacaaaaaaaaatggacaaaagatctgaagagacctgagtgaagaaaatatacaagtggcaaataagcatatgaaaagatgctctgcatcatatttcataagggaaatgcaaattaaaatgacagtgagataccaccactaaataggatggccaaaatccagaacattgacatcaccaaatgctagcaaggaagtggagcaatagaaactcttattcattcctagtgggaatgcaaaatgctatacccactttggaagacagttggtagtttcttacaaaatgaaatgtactcttaacatacaccacagtaatcacactccttgatatttacccagataaactgaaaacctatatctactcaaaaacctgcacacagatgtttatagcagctttattcataattgccgaaacttcgaagccaccaagatgtctttgaatgtataaactctggtacatccagacaactgaatattattcagtactaaaaaaaaatgagctatgaagctatgaaaagacatggaggaaactgaaatgtatattactaagtgaaagtagtcaatccggaaaggctatgtaccatatgtttccaagtatatgacattctggaaaaggcaaaactgtggagatagttaaaggttcatgggttggggaggagggagagatgaataggtggagcacagaggatttttagggcagtgaaactattctgtatgaaactacaatgatagatatatgtcagtatacatttgtccaaaccaagagaatgcatagcactgagagtgggcactaatgtaaactttgccctctgggtaacaatgatgtgacagcataggcgcatgggttttaacagtgtaacaccggtgagggatgtggataatgggggaggctgtacttgtgtggacacaggggtgtatgggaactctactttccgctcagttttcctgtgtacctaaagtttgtcttagaaattttattaataaaaaaatggcagctatgaggcagtagaacagtatgttcaaagaatatacatgaaattctgtatctaaaactatccttcaaaattgaaggtaagataaagacattcccatataaacaaagactgagataattggtagattgtagatttgtccttcaagaaatgctgtattaaaggaagtcctttaggctaaaaggaaatgactccagacattatcttgaatccccaggaagagggccttgtgagagaaataagaagagaagacatgtatctgtgaagaaaagtgggaaatctaacagtgggtgaaatagattgattacttactgtatgactgtccgaaagagacacagccgtgtcctcaggaaatatttgctaggacgcttggtaaaagaaagtgatagggcacctgctaggctatttttaaatgaaatcatagatgttgggagtggcacagccttctcagctcatgacactttgcttcccagtcagttcttcccacatgtgcccttcctcctctgtgtttgctggcattaaaagtcagtgtactaaacgttttcaggagagttgttatataaactttcaaaacctcccttagaataaagagcattttctagttaaatttcacaaaaatgtttttcacacagctctaaaaataacttggaattcagggtgagccatcatcctagataaattacagtaaggcacatttgtctgagagaaagggagccaacagagacatgatgatttatctaactttgtgaggaaaccaagacaggaatttgttagaattcaaagtattatgatttcaaccatgagactacatgaaattaagcaacatttaatgtttaatccctagcgaatgacatacttttgctctgggatgtgatttgtttgccgtaattcgttttagtgatattttgctgagataaagctgcaggaatgtttgcttttcttatggcaactggcaaatagttaaaatggactgtgagaacatttgttcttcaggattctgtttaatactgagtgtaggcaaataaaacaacacatctgggctctgtttttttctgtaatctgatggtattggattagattatttccatgatacaatcttattcaacaaacatttatgaagttctcaccacatagatggtgtgggagtcagaataaaaggccagaccctcagagaactgctgtcttgggaggcacgtggcagtgaagggaaatcattgtgatgttttgtgagatgctatggaggctacactgaaaaggaagtgattaaccctgtccagatatggagggcagggttgctgggtggcttgaaaggtttcagggagatggtgcccaagcaggacttgaagattggataggagttatcaaagaggacagcaggcaagaacgaacttctagagacccaatttttcttctgctttctacttatcaaaaagtatttagcattgagagtgttttctataatgaaggctcttaaaattattatttaatatttcttgaacatgcttggtaccatttaaaatacaggtttaggccgggcacagtggctcacgcctgtaatctcagcactttgggaggctgaggtgggtggatcatctgaggtgaggacttcgagaccagcctggccagcatggagaaaccccgtctctactaaaaacacaaaaattagctggttgtggtggcgggcacttgtaatcccagctactcagaaggctgaggcaggagaatcgcttgaacccgggaggcagaggttgcagtgaaccgagatcgcgccactgcactacagcctgggtgacagagcragactgtctcaaaaaaaaaaaaccaaaaaaaaccaaaaaacaaaaaacacaggtataatctaaataatcaagttaaattagaaacggctttggtacattgtcaggacactagggggacatttacttctggagtttttttcagttctgtgtattttacttcttgagtctttgtgctgaccactctatttcagtgaattgagttccctttaaaaagcatatcagaaagtaaaactgcttttgttgtgtttctattcagctacaaatctcccagagtctgcttgcagtgaagtgttagtaatgaggtctcttctgtccccacttcaatgccgccgtgaagaaaatcccatgaaatgttataaggcattttagtggatggaaaagcaatataaatgaccagattacctaggtgcttaaaattgcatcaggtggcctccttgtagcccttgccacatggtaattaaatgtttgttactgattgttctcctcactggcttagtccacacacacagtggcatcaggggctgggtcttgttgattcactgatatccaagctccacatccttagggtgtgatcacagctcactgcagcctctacttctgggtctcaagtgatcctcccacttcagcctcccaagtagctaggaccacagacatgtgccagtatgccctgctaatttttgtatttttggtagagacggggttttaccatgttgcccaggccagtctcaagctcctgagctcaagtgatcctcctgtcttggcctcctaaagggctgaaattacaggcatgagccacagcacctggctatgctgctcaatcttgagtgcagatattgtcaattgttgtgcttttttttttttttttgagacagggtgtcattctgtctcctaggctggagtgcagtggcatcatcatagctcactataacctcaaactcctgggctcaggcaatcctcccacctcagcctcctgagtagctgggaccacaggtgcatgccaccacacctggctacttttttcactttttttatacagacggggtctcactctgttgcccaggctggtctcaaactcctgggctcaagcagtcctcccgcctcagcctcctgagtagctggggattacaggcatgagccactgggccagccttgcttaattaagtttctgaaactgatgcctgtagatagttcctcttagatactctagttgacgctgtagcatctccttttaaactagattcctgaactcctagatttctgacctcatatttatgttggcatcttgtctgtcttgttgctgttgttatatgtaatttttaaagacaataatctgatttaggagtcacaaaccagcagtggcctcggccaggtgcggtgttcggccagcacagcagtttgaattgttttgactttgaatgaagtcttcaggcaaggcttgtactttggacagcccactactctgtgttgtttcacactgattgtttctttcattatcacaattatttaatttttgtgtttctttgtatattgtcagtcttccataggggctgcctccatgaggtcagacagcttttctccttcgttcattgccctccaccccagccctagcccagtgcctggtaccagagggcacttgagaagtgtagttgagtggatgagtgcacgacatccaggatctgaggtgatccctggtgtgggtgtgaaggaatacggttggtctttctaccaaacatactcaaacatgacgagcccttaaagctgccagcttggctgctattgcttggaacgtttctgaaatcctctctgggaattgccttttttcagtcagtttatgattcaacagcacagttgttcaagattttcatatttacaaagtgctttcctatgcattttcctattggagcgatcatccccattctgaggtgagtgtgcttagtttcaagtagtgaatgaatctgcctgtgttgcacagcaagtatgcagcatggtggtcttgtccccctcccccatgctggcttggtgttttctcttcttcaccaccacagtcagtgccttgtccagtttctgtcaggggtgggtgcggggggcctggggctctggtgtgttttctaggaaagagagtgacattattccagtgtcttctggtaacactatattcactttttttttcttttttttgggacagggtctcactctgtcacccaggctggagtgcaatggcaccatctccacctcctgtgttcaagctgtcctcccacttcagcctcccaagtagctgggactacaggcgcgtgccaccatgcctggctaatttttaatttttggtaaagatggggtttcgctgttgcccaggctggtcccaaacttgtgagctcaagcagtccacccatcctggcctcccaaaatggtgagattacaggtgtgagtcaactgcgcctgatctaaattcactttaagaagcatattaagrccggacgtggtggctcagcattttgggaggctgaggtgggcagatcacaaggtcaggagttcgagaccagcctggccagtatggtgaaaccccgtctctactaaaaatacaaaaattagccaggtgtggtggcgtgcgcctgtagtcgcagctacgcgggaggctgaggcagaagaattacttgaacccaggaggtggaggttgcagtgagcaaagatcgcggcactgctctccagcctgggcaacagagcaagactccgtctccaaaaaaaaaaaaaaaaaccacattaaaaaccaaaattgtgtgtgtccaagttcctaggtagccatagtaagtgctataattgataaggagggctttaggccataatgaacagacagacttggcgcgggctctgcctcctgttcattgtcaccgcactcctgtgccatcatattacagggcccggggctgggctttggcacctttctccgccccccctcacaggattgccgggaagcatgtgcttggcatcttactggagagcagagctcacttcaatgtggctgctcttcccaggattgaacactcaggagcctggtctgaaatctccagccttccttcaggttttatttttactaaagccagcctgtactcttttaaaccagggagctgaaggctggcttctgaaaatacaccccacaggccactctgccgtggcttgttcaggcattccagggagggcttgctgacctgaaggtgtcctctggcccaggtcaaaagaccagagaagacactggcgccaggaaccgccactggcaaggtagctgccatctgaggtaggatattgttcttttttttttccagtcgaaggcggccttaatgtggcttctcagacatttgagaccaaaaaaaaaaaaggcagtttgaccctgcctttactttctgaaaatgacagaagctttcagatatatttcaagatatgggtcataagcatgacccatagtttatgtcaccttaaatagagcagctgattagaactggccattggttataaaataaaagagtacgtgtaggtttgtgggagcaggatcctaactgctttagcaatactaagccactccttgccgtgtgatttcagtgtctttccttccagttggaactcctctctgccctttagcctgattttcttgtgtgtaacatggcaaattatttcatggctaatccttcttacagacctgaaattgttctttttaaaaaaaactttggtgggttttgagatcccctcctttgattctcagatgtggctgttagtagtttaatttctgtatgtggtttctgagtagcttccaacaacctatttttrttaacagttctttaaaaaaaaaaatgctcgagagaaaggaatcttaggaacggattccgtctgtgaaatgcaagggagaattttggccaaagtagaaggaatggaatggatgacataaagggtgacatttgtgctcagagttgatttcttggtgatagtctcatgtctaatttgaggttccagaagccctttaaagggtggatgagctgcayaaatggatgtgagggagttacacagtggtgggttcagcagaaagtaaaggagcagcagaatcacagagagaagcccygaactctggctgcccgggcccaaggaaccctcacccttagcgggactttgctacctttgcactcttttaacctgggtctagagctcatggatctggcaagggatgaaaatataagcagacagtattaatatgtgagcccctgagctctctcccttcctcacgccagttcgtgagtctcatcagtgtgagactgtgtttcaggtctcttgcccaaggactaagagtgtgactatgactgcacacattccatgtgtaggtggtgccctctgcttccagatgccgtgtgcactatggtttctatttgaggggctctcaccttctttttctggcttcactctctctccccatgtctctgtcctgctttctgccatggctcacagtggtgctagacagactctgtcccttctttctacaagctgatctccaaatgctgaaaatcgtgagccagatattttttcccagtccctttttataccatcaatcttgccttctcagtccatgatctggctatatatctgaaactagcagttaataaggattttggtataaaatgcatgattgataaatatattaaagtttatacatatatataaatccttcttgtatgccattttcaaagaaaacaggcctccctttgaccttgctttatgtagatttatttcctaatctggaaatgtggccagctagaacactgttcctttcttccactgtgaagctgtccttttagctggtagaaagccctggacaccacagcaaggtggtggggctttccatggctagctctcatggtcatcctgacttccaaagacaagctaggaaagtgttggcacagctgtctctaagaacccaagaaggcccagcagtgtggccacatgccctgcatagtggaagaactattaggagggctttcagagtttgaaaaactctggaaagagtcgggattatcaatatgaacaacttcatctagtcaggaaagttatgctggaattgaacctgattctcagataaatggctcactctggggtgtcttttcccaccatggtcattctttgttagcaggggagagttggcactggattttgttttttgtttgcttttgagacagggcctcactttgtcacccaggctggagtgcagtggtgcaatcttggctcactgtagcctcaacttcctaggctcaagcaatcctcccacctcagcctcccaagaagctgggactacagacgtgcactaccatacctggttagtttatgtgttttttgtagagacgggatttcaccatgttgcccgggctggtcttgaattcccaggctgaagcgatccccctacctcagcctcccaaagtgctggaattacaggcgcgaggcactgcgtttggccttggcactggcttttaatttgctttgcattctgattcgatagcactttaccagactgaatgcagacatgcgctctccccacagacagcggcccgggccaaggatggatcccattcacccggcgccatgtttgcctcaggcaaagtggtctccagggccaggagaccaaggctggcctgtgatgttgtgtcaggtgctcaaggaatcccagaagtgtacaagacggtgtgtagttttcgctcttttcttcrtgtcatggattgctggcttgagttttaattaggttgcatgaaagtgcaatttgttgggaactttaatcatcttccactggggagccttgctgggctggtttattttcatcytgctcctccctgggtgtgaaracggggttgagggacattttagtacctgtctgctctctcctgctttgctggccttgataaccacattttctaacacaaaacttgggacatgagagcctgacttctgccaatgttgtggagttttttcctatttgttaatttgattaaactgaaaggtttatgaaaatatagaagttaaacaacattggacacttaatacatttaatgagcttcctttatttggaaagaaccacacttcacaagccaggggtcccttcagacagtcttgggagtcggattgctgggaggtgaggtcctgatccaggaactttgagttaatggtggtcattatgatgctggtggcagctgtgttccctctgtgtacagatgaattcatccaacctcataacaaacccaggagggaggtcctctcacaacttcagctcagaggcgaggacactgaggcccagggcagtgaggcccctttgccaggctgccaagtgactgggccagggtgtcacccaagccaggctggcttgagggttcatcctcatgacccctgcactgccgctgttgtgctgcagttagtgtttttcaagtggtctctgagttttgagaagcgacaggctgcatacttggctcttgacccccatgacctcggtggcactgtgcctcagccccaggttgtcaatttgaaattgggtggacttcacaggcactggcctccaggggcccacggaggagtgttcggaggggtttccacccaacacgcctagtggggctctgggtcccggccccagaggctgagccctactatccttccctgagctgaggcccccacccctttcatacctcaagctcatcctgggcagtggctgggccctgggccattctggacaaggcagggtggtcctaccctgagacctacctggtacaaagacctgggattgcagtgagaaaaaagcttttaccaaatagccatccagccgggttgaactcttcccaagcccccacccctcaaccagcttattacatgcaagttttaagctatccttgcctggagccttctcttgccttttgtcaattgctgtaattttctggtaaagctatatcaacaaaatggcaaccattcctgcctcccactgtttatccctccttcccctaggaaaccctcccacattccctgttttcaggatcttggtcccgtgcaggactccaggcagcacccacagaaccctggagtggcacaggcctcggtgcctactctacagctttcctgagcacttctcagattccacacaaagggtccttgggacccagcatagcctgcaggcaagaacacctggtcagaacttcctcttggggcagggatggtaccagtagtgcctggtgaaaagcttggtgctttagataccaccttaatccccagttcatacaatggaggcttggcatagtgtagggcaagagggagctttatccatgcagcagatagtagctgaggtgttttcagaggtggattaagtggcagttgatgggaaactgtcatttttacagtccaagaatgtggctgttttttatggtggttaagaattcaggtgtatctggaaaagcaggtgaaaaagtaaatgctaatctagttcagttgacagttccgttgcagtagaatcctcttgtagggggcaatttagcatagatcaggacagccaccctgaacatgaacttcaggatcaaagcgacttggtgcatagatggatgtgtgttgggagtccacagtgttcctggcttcactctggcatccagagttgatgtcmtcttacgaaaggaagcagaattttttttttatatgtgggcttgagatgggatattaagtaggtggctgagggttttacattattgctccaagcttatgaataatttagagctacagtctggtttgccagaactctcttcttggattccagcctcttccttcctgagaaggattctgtgctcgtaaaccacagccctggaggtggactcggggggggccttttgtctcatagactctggctcgctcgtcaagtggccttccagggcattgcttcccagcgacagcacatggtgctcaccacggtcctcaccagctcctcctcagccttcctttaaccctgtgtccccctcttatctcctgctttgggcacaggaggacaggtgaatgcggaggaatgggggaggttcaggggaaataagggcagatggggaaaaacacacattttctaagaatcaactgcacactgttgcacagacactcatacagcctccagatttcatggctcactggggaatgctgggcaggaacatgccacaggcacagcggggcagcacgctcaccggccggagcccatgctggtgcttggggcagggccctgcactgaatcccctttgggtgtctgtgaggcctgtggtcagaagtccatctgtggccctcactgtaacagtctaggggctgctccacccagaaacgtccgtcctctgagtgtctgctctgaagaggataagaattggtacgacttcctttttcctttcctcaaaaaacccctttctagtttcacaagtattcagggattgaaaatgaaaacaggcattacttgaggtaaggccaacacaggtttccgaaggagaggcaggtgagtactgacacaccacctcttcctgtaacactgtgggtgactatgtcctaggctgaatggcaatctccgcttgttccctgaggggcagcatgaggcctgtggcttttctgtccgctcatgtcagtactgagaggaagaaagttctacaatgctgaacagtcggccgagggtkcagggcctgggtcaatgcttgctagggcttagagctggagtccacagagggagatctgggattcatatcagatgagaggaagagcctaggaaagtcccctgaactctgctactttgtcactggtgtgtttggttttggttcttccaggaagagtctgccraaggtgaaggccatggacttcatcacctccacagccatcctgcccctgctgttcggctgcctgggcgtcttcggcctcttccggctgctgcagtgggtgcgcgggaaggcctacctgcggaatgctgtggtggtgatcacaggcgccacctcagggctgggcaaaggtgggtcctggaggcagtgctgccagggggcgggggtaagtcagccagggatgaggagcggcccagctgcacagggaccaccagcgcaaatgcccgaagcggcagcagaaggccagataagggaagtgggccggatggcactgtccttggtacaagtggaaaaagcaggagccaaggcacagtgagaaatgactcagcgtcagggtgggaggcaagtgtgagagaagcagcctggccccgggggtggggtggggtggggtgggatgggatacctgcccctcacagggcagccctgctcagcctcagttgcttgctgaggtaggaattttatgtgaaatatcccaatttccaaatatggacagctaacttaaaacgtgtttttacctctatgaggaccaaatgaaacatgtcctttcctagattcagccggggcctctggttcacagctttggtgcatgctttctctgggccttgccatcccaggccaggcccccagctgtcccctcagcatggtctagacaaggtcaaagacagataaatggtgcctcagctgttccagggtctccaatctaggtccattccaacccagtgaacaccatgagcttctaagtctcaggaatggtgtaccgggaccctggcctggagtgtcaaaacctgggttcccccttctcccatttctggaagcctctgagttacagggctccattgttttcctgccacacacgtatattgacttggcacgttgcacatgcacacaccataccatctgccatccacgcttactctgagttccatggaagaaagctgaggagttccctgaattgtggtgaccccacccgctgctacatcttctggttggtgatagctcagctggagctgatggagcacctgctaaagtgggaggctctgggtcaggttctagaacaaacagatgaaagacagggtcccttccttcaaggaggtcacggtcgtctgttgtaaggagaaaggcaaggacttatctcaatatattgccattgcagtaacatatgctctcaaaccagcctggtggcaacaaggcacatgtatatgtgctgacttgtgctaagcacttttacatgcatgatctcactgacttctcacagctaagattcagagaaggaatgactaggacttccagccagaaggtacaaaacctagagtcaaacccacatctctgtctctagaactcacagtctcaaagcttcagcaggggagatggccaggtagaaggaataggtgggctagtagacagaacattccagacaggcccagaggtaggggagaagcacggtcctgtagggacttatacagttgggtgttgcatgaacacagagaggcaggtgggtctttgtggtggaagtggcttgcagttggccaggggtggcctgggaaagctttagggagtatggattcatttgtgcaccactgtggatgttaggtgaggtctccaggggtgaacaccatatctgtcattggatatccagwcctttgcagggacagctgtctgcaggccctttgccatcgtcagtcctctgaccttactcagttactatatatagggtggtcagcagccacttctcttgagctcaaagagaagcattttgtgaaagtccttgaagagcatttgagggctggcagaggtggagctctgagtcgcaagtgctcccatccatgcatgtttgagaagcatgctgtcatcttcattctgcatctcctctcctgacaccaagactatgaagggaacagaaaatgtcacggaggtcaccagacctgtctatgtatcataagatgtcaggcccttcctggattccagtcactgcttatattctgccccatttaactttttgggaacaagagtccctccatccagataaagtagggcaggttcttaactggccatgtcaagtacagccactgttgatgccaccaaggacgttctgatgttgccttgcttctgtgaggaggcagagctatgttgtcctcagtggctctgcctgccgtgtyagccacccggaaggtttggagttatgcaacgagtcttcagttttccgtgtttctcctatcttgtctcttgttttgtgtacttaagcctcttgagcttgtccttgtagaatagtgtgggaccactgactaaaggaacagaacgttctggatatctccttcctccagctttagccacagggctgtgcacagctctgttgatttccagccaggcgtgccagcggcactggacagtcatctgcagcccttcatatatcgtaccttggagttgttttccttggaccctcctaccttccaatatcagcttttcaataaatgaaaatggaatccttccaatctgttgttttcatttctgtcactccctacacaaactttcatttcctctctttttagctttgctaggaagcaaaactcaaacaggtttgaggcagtcatctccccaaagctgtttagactccagcgggactcccacctttgaagggttctgtgtctgcaccctttggtggcacctcacaaatgtcctatgtattggtcaggacaagacaaaatggggtgaggaagccagcagggcccaaggttcctagcctttgggaatgatttataaaccggatgagcagttctagcctcaggaatgctggcatctggcttggagtgcagccatcacccccctcattcctgtgggggctctgctgctctgctgagaagcgcaccagggaggcagggttggggcgctgggaccaggcctcactacccagggtgggtgctctctccgggcttttgccctttgttgggatgagccaacgaacacaccaacctcacctccttcaaagaagatagtgtgtctagattgagtctacttagcacctctttcccgaagactgtcgggtgtatggagaggcgcctgggggatgagcaaatgctgtgtggggagctgaacaagaagctgtggagcacacggaggcttcacaccatgagacagacgtcagggagccttccctcagacctctcaggacccctggtgctgaaggagtttcttctcctcccatgttttgaacccatctagctttaaggaagtttgacacttctctaagggcaggcctgttcagaccagtacacaccgcctgcccctctgacctttccttcccagctgaggagatggcagccctgatcctctgaccctgcagtattggcccatcaccacatggctaccagagatggaattagcctgcaaaggccattccctttcatgaaccaggagctagggtgccacctaatcacctgggcctctaagattcggtctggaaccaagtcagtggctcactggtgtcaggtcagggtcagccaggggccaaggtatcctgtgcagatctgctggtgagcacttaagggagactatgcctcaggtgaggacaggagtgcctctttaaaccagcatgtggccaggtgcagtggctcatgcctgtaatcccagcacttttggaggcccaggcaggaggatcgcttgagttcaggagttctagagcagcctgggcaacatggcgaaacctcatctctacaaaagttagccaagcatggtggcatgtgcctgtagtcccggcaacttggaagcctgaggtggaggctcgcttgagcctgggaggttgaggctgcagagagccatgatgacactactgcattctagcctgggtgcagagcgagaccctgtatcaaaaaaaaaaaaaaaaaaagtaaaaaactatgtttcagttttcatcatcagtttttagaacattattatttacacatatttttattttttgagacaggtcttgctctgtcacccaggctggagtacagtggtgtgatcatggctcacttgacttcccaggctcaaggatcctcccaccttagcctcctgagtagctgggacgtagcagatgcgccaccacacctggctaattttttatttcttgtagagacaagattcctatgtttcccaggctggtctcaaacttctgggctcaagcgatccttctgcctcagcttcccatagtgctgagattacagcatgagccactatgcccggccagaacatttttacaaagtagttcagaaatatggccaggcacagtggctcatgcctgtaatctcagcattttgggaagtcatggcaggaagatcgcttgagcccaggaatttgacaccagcctgggcaacatggcaaaatctccatctctacaaaaatacaaaaattagccagccatggtggcgagtatctgtggtcccacctactctgcaggctgaggtggaaggatcactggaacccaggagttcgaggctacagtgaactataattgtgccactgcactccagcctgagcaacagagtaagaccctgtctctaaaaaaaatatttttaataaatagaaatacaaaaatgacaattgacaccgctgtagtgctgtttatcaaacactgtggtaagagattacctaccttaactcattcaatctcacggtcacaccccgagggactgaatgagttaaggtaggtagtctcttactaccgtgtttgatagataaaaagcatcctaaataagaggaaagtcagaaacaaagaggttctaacttactggagttggaagtctagctcaagtccactctcttggctgctgggctgtcctgcttttcataagctgtatgtacatttttggggcactgaacatttacataggatatgttgcaggggagggtaagcaagaagcaacgacgccaccctctgcctcctctcctcccatcactccrtttcctttctgactcctcatagagtagtcctccacccccagttctcatggtttaccctgctgcgtccagggggtttctcgtcaggccctcctgcttagccacaggagaattacctgtgacccttgctgggccccccactcaaggctgatcacggccttccctgggatttgatcagagctgggaagagacaagacaaaactgtgcatgtgagctctggggcctgcccgcgtgtgagagcacccaggcacgtgagagcacccgggcagccagcacttgggtccctcctaggtttcggccatccggctctcctcttcattcttgaacttccccacaatccctctggcaaattctctttttgctttgccccagtgtgagtttagtttctgtttcttgccaccaaaagaatatagagcacgtgtctgactagctttggactgtccctgctgtggtcgtagttgaagtccgcatcgattgttacctggaatagtgtggtgggcttggtggagcctgctttcctccagtgtccccactccctcccgcccagcaggactgagccttttcaaaggcaggcacccttaatagtcctgcgtgtggcaggtgcttgcgtgcactgacttgacccctccccagccagtgaggctgttagaccctccaccttctgtcccatctctatctgcctgtgssccttcaggcactctgctccctctgcctcaagcactccctgggaaacagcccatcagatctgggaagggcctcggtcccctgccccagcttttctacaggactgtgtgagtatttccaggagagctgtgcctgggtagtgccaccacacagtcttggcagggcacagcaccataatagctggccctcattgaccttgccaatcaggacaagaccctgcctgagtgaccttggtgagctccctcagctgtgaagataggtgatgctcacagctgatccaggtgaacaggaacatcatggggtgttctgagcatgatacttaasacatctgtccacctcggccctcctttctctttgccctgtggatgtttgtagcactgggcgtgagcccggcattgggccctagctcccagcttcatgctgggccacacagcaggggccaacacagacctgtgaagggtgtgaagcagcaaacagcaacgctgggtgaatttaaactgaacggcactgaggaagaatggctgtcaaggctcttttctcttcccttagaatgtgcaaaagtcttctatgctgcgggtgctaaactggtgctctgtggccggaatggtggggccctagaagagctcatcagagaactcaccgcttctcatgccaccaaggtgagccaggggcgtgctttccayggggaaggagtgcaggccgtcttctgtaggcactgaggagatagtggcccactcctggactgctgagctgtaggacatccatgcgtcacactgtcccagggaaggcagcaggtctccatagcgaaccgggcccactgcatrgggagagagaactgtccagtggtttacatcctgatgcccctactggctagcactgtgagttgagaaagttctcttttctccctttccttttacctggctaagctctacttactgggtgggagtgggggatggtgataactttaaaaggtgtttttttttttttttttgggacacggagtctcgctctgtcacccaggctggagtgcaatggcccaatctcggttcactgcaatctctgccccctgggttcaagcgattcttccgcctcagcctcctgagtagctgggattacaggtgcacaccaccacactcagctgatttttgtattttttgtagagacgtggtttcaccatattgacyaggctggactcctgatctcagatgatctgcccgcctcagcctcccaaagtgctgggattacaggcgtgagccaccagtacagcccttgttttattttcttaggctcttgctctgtcacccaggctagagtgcagtggcacagtcatagctcactgcagccttgaactcctgggctcaagtgatcctcccacgtcagcctcttgagtagctaggactataggcatgtgccaccacacccagctaaatttttttttttctacttttatgtagagacacggtstcactatgttgcccagattggtcttggacttgtggcctcaagtgatcctcctacctgagcctccttattgtggttttgatttgtatttccctaattaaaaatgatgttgagcatcttttcatgtgcttattgaccatttattaatctttggagaaatgtctattcaaggccaggcactgtggctcatgcctgtaattccagcactttgggaggccgaggtgagtggatgatcacttgaggccaggagtttgagaccagcctggccaacatgacgaaacccatctctaccaaaaagtacaaaacttagctgggtgtggtggtgcatgcccgtagtcccaactactcagaaggctgaggcagcagaatcacttgaacccaggaggtggaggttacagtgaaccaagatcgcaccactgcactccaccctgggtgacagagcgagactctgtctcaaaaaaaagagaaatgtctattcaagtcctttgcttgtttttttaatcaggttgttgtttgttgttgttgagtttaggagttctttatgtattcgggatattaatcccttataagatatgtgatttgcaaatattttctctcactcagtatcttttcactttctttttttttttttttctttttgagatggagtttcactcttgttgccgaggctggagtgcaacggtgcgatctcagctcaccacaacctctgcctcctgggttcaagcgattctcctgcctcagcctcccaagtagctgggatgactggcatgcgccaccacgcccggctaattttgtatttttagtagagacggggcttctccatattggtcaggctggtctctaactcccgacctcaggcgatccacccgcctggggcctcccaaagtgctggggttacaggcatgagccaccatgcccagcccactttcttttttttttttttttttgagagggagtctcgctctgtcacctaggctggaatgcagtgacacgatcttggctccctgcaagctccgcctcccaggttcaagtgattctcctgcctcagcctcccaaatatctgggactacaggcacgcaccaccacacctagctaatttttgtatttttagtagagattgggtttcaccgtgttggccagaatggtctcagtctcttgacctcatgatccacctgcctcagcctcccacaatgttgggattacaggtgttagccaccacgcctggccaagttttataattttaaatcttacatttaggtgattgatccatttgagttaatttttatacatggtattaggtaagagtccaatttcattattttgcacgtgattatctacttttcccagcaccatttgttgaagactgtctttcctcattgaatgggcatccttacaaaaatcaattgattacatatttgaagtgtctatgtctaggttccttgtgccattcagttggtctatatgtctgtcttatgtcagtaccatactgggttttctcccccttagagggacggggtggagcatgagggtaggaagggggaggcaagggggaggaggaggggaaggacccatactgttttaattgctgtagctttgtacaagttttgaagtgaggaagtgtgagtcctccatctgtcctttttcaggagtgttttggctattcaaggcccattgtaatcccatatttgtgcaaaaactgccagtgggattttgataggaataacatcgaatctattggtccctttggggagtactctcacatcaacaacacggtcttccagtccatgaatgcaggatgtctttccatgaacttacatcttctttaatttctgtcagcagtgttttacagtcttttatctccttagatttattgccaagtgtttgtcttagtctgttttatgctgctgtaacaatagcagagactgggtgatttttatttttattttattattatttttagagacatagtcttgctcggtcatctaggctagagttcagtagtgcaatcatggctcactgcagcctgaaaatctcaggctcaagcaatcctctgcctcagcctcctgagtagctgggactacaggcacatgccactgtattgggttaattttttcattttttgtagggacagggtcctgctatgttacccaggctgatctcgaactccaggcctcaactgagttgcccactttaccctcccaaaatgccaggattacaggagtgagccactgcgcctcgccggactgagtaatttttaaagaaatctagttttcaaagtctggaggctgagaaatccaagttagaggggctagcatctggcaagggtctggtgtctggcaggggccttcttgccacatcttaacatgtaggaaggcatcacatgggcgagagagagggaaaagggctgattttatcctttgataaggaagctcccacaataacagcattaatccattcatgaagttcccacctttcaacactgttgcattggggattaagtttctaacacataggttttgggagacacattcaaaccatagcatatttaatttttttaactgctactgtaaatagaattgctttcctgattcccttttcagattattcattgtttgtatatagaaacacagctgatttttggatgttgctcttgtaccttgccactttgcttaatttgttaattaactcttattagctttttgtggatttattggaatttcctatatatagaatccatctgcaaacagaggtagttttactttttcctttccaaattgggtcacttttttcttgtctaattgttctggttagcacttccagtacaatgttgagtagccgttgtgaaagcaggcgtccttgtcttgttcctgatcttagaggaaggctttccatctttttccactgagtatgttatctgtgggtttttcataaacaccctttgctgtgttgaggaatttctggtctagtcctagtttattgagtatgtttaccatgaaagggtgttagattttgtgagatctcttttctgcatcaattgagatgatsaagtggggtttttccctcgttctattaatgtgatatattataatgttcaattttcttttttttctttctttttttgagaaggagtttttgctcttgttgcccaggctggagtgcaatggtgcgatctcggctcaccacaacctccgcctcccaggttcaagggattctgctgcctcagcctcccgagtagctgggattacaggcatacgcctccatgcccagctagttttgtatttttagtagagacgggggtttctccatgttagtcaggctagtcttgaactcccgacctcaggtgatccacccacctcggcctcccaaagtgctaggattataggcatgagccactgcccccggccaattttcttttttttaatttaaagagacagggtctcgccatgttgcccaggctggcctcgaactcctgggctcaagcaagcctccctcctcagcctcccaaagtgctggggattacagccatgagccactgtacctggccatgattgattttcctatgttgaaccaactttgcttgcattcctaggataaatcccacttggtcatggtgaataatccttttaatacgctgttaaattcaattcgctggtattttgttgaagatttttgcatctatattcataagagatattgctctataattttcttgtgatatctttaatctggctttagtatcaaagtaatgttggcctcagactgaattaggaaatgttttctcctcttcagttttctagaagagtacaggaaggactggtgttaattctcctttaaatgtttggcagaattcaccagtgaagccatccggtccaggacttttctttgttggaaggtttttgattactgatccaatctctatctgttagaagtctcctgagattttttatttcttcttgagtcagtttaggtaatttgtgtttttcaaggaatgtatccatttattctagtttttctaacttgttggcaaataattgttcatagtattcttttataatcatttttataatctttataattttttttatcatctcatcatttctgtaaagtcagtggtcccactttcatttctgattttagttatttgtgtcttctgttttttccttgtcattctagttaatgctttctcaattttgttgatcttttcaaagaaccaacttttggcttcattgatttttattgtttttctgtattctgtttgtttatctctgttctaatctttattataatgtttccttcctctgctggttttgggtttagtttgctattctttttctagttccttaaaatataaagttacattattgttttgaggctaagtgatccgtgggacacatagctcagatggcctgccactcagaaagtgaatttgtatctgttgtatttgaccaggtgcagacacacaagccttacttggtgaccttcgacctcacagactctggggccatagttgcagcagcagctgagatcctgcagtgctttggctatgtcgacatacttgtcaacaatgctgggatcagctaccgtggtaccatcatggacaccacagtggatgtggacaagagggtcatggagacaaactactttggcccagttgctctaacgaaaggtaacagtcttgagaaaagagcagtgataagtgatatgttggcattctttttacttcacttggatccttttcagctaaacgttccccatctccatcctctctgttgccctggagtgggtgttaggtgttattgttacagtttgggtatttgctttatagcttccaatcaagatgttctctttagtgacagccacatttgtgcagcattacctacatgtctttttcatggtgcctgcaaacccctacaaggtggggatatttttatgtcccaccatggatttcagtccaggggagaggctccagcaggaaaagggaactgagctaaccatttgcagtgacctctgtccctgtttccttgcctctctcctctctcctgctggcctgctggcactctgctgggcataggaggctggaagttccaacatagtcctctaccctaaggggttttcaccattctccctcattctgactaaatatcaaaagcaaggtcgmcttccatcagcatcgggtgcaatgactggaagtagggcgcttgcctaagcctctgyatctgtcctcagcactcctgccctccatgatcaagaggaggcaaggccacattgtcgccatcagcagcatccagggcaagatgagcattccttttcgatcagcatgtgagtacttctctctcccacaaaatgcttggctttattgttttttcctgattataaaaataacacatttactatctagaatttagacattgtagaaataaactatccagaatgcaaaggcacttgagaatgtgttctccagagccacatgcctgggatcaaatcccagctctactttctgtcccckgtgtgaccttgggcaagtatccccmcttctctgtgccctgccctcaagtgtaaatggagacagcctcagtcttagcccggaggactgctgtgagcgctgtgcttggagctgccccagacactaagcactaggcatgtgctagccactcctactgttaagatttttagcttgtcccacagatataaccatgccatcactttggggcatatgcttccacagttttttctacgtataattcaaacatgcaaaaatggaatggcattattcatattgctttgtggcttgttaatctcacttaatgtatctttctacatcagcatgtatggatttacctcatcctttcaatacagtaatccattgaatgagtgtgacataaytgatttagccattttcctggacacttgaggattttttttccccctcagtctttgaccattagcagcagtgtgctgtgtagaacattctcaaatatttatatctctgggcactcaaatgggaaggtttcaataaaaagggttttaaggtaatttcacaaactgtcctttctttgcatcatctcccgaaaggaaatactgcctataccagcctcatctcctctcagccacccaagggctagacccagccacagcctggtcagcaaaggcagggaaatctgagctgctgcagcactttgcaagggcagccccaaacatccagttccatgacactatagggccagctgtgaactgagagtgtaacacagtttattctttcttccaagatctggatcccagctctaccttttggttctggttgtattttcttggacacattacttaactattctgatcctgtttccttacatattagtgagatttacaatcatcatacatgcttgtacatgcatgatttccctgtttgttaatattctctttcagctttggataggacagccatctaaggcttctcaaatggttcaggaaaaaacaattatatatagaatcatcaatgataaagcaaatgagttaaaatgttaataataggtaaatcagggtaaagaggttttttttttttggaaacagagtttcactcttctcgcccaggctagagtgcagtagtgcgatctcggctcactacaacctccgcctcccgggttcaagcgattcttctgcctcagcctcctgagtagctgagattataggcgtgtaccagcacacctggctaacttttgtatttttagtagacacagggtttcaccatgttggccaggctggtctcaaactcctgacctcaagtgatccgcccacctcagcctcccaaagcgttgagattacaggcatgagccaccgcgcccagctggagttctttatactaaattattttcaagttttactttgatttataataataccactgatttttgttgtctggcctgctgactgcagtaaggcatacaatggttggtctccgtattcagttttataatgaccaggctgaatatggagtgcctcttgggcaagttggttaactcagataagtagtggccttctcacctataaaatgaggagaacggcattttctctgtcacactgctaaagtaaagaccaagtcacgtggtccacagtgtccttagtactgggcctcacactggcagggtaagtgatgtggccagcggcgaggtcagcacagcctggctgagaactcacagcctgagagctctggggagacccagctgtcagagtgtagccttctgttttggggacttacatgataacccactcttccctgtccccaagcctgggctgtactcttggaatcatggctgataggagcagtcctctccatccacccacagccaactcatccagcccccagcaactgtgccccaaaccaatggagcaggcccagcaaggcactgcagcaagctcagacactgctgaactgcctcatgtgacttgctgcgacacttcctttctttctgtcttcctgtttccttagctgacggatgccccttctttcctaaggctaaaacatttacaattctgaattggaggaaactgatttactgtggagacgctggtgtgtttcccaggaatgtcattatagggtcactgtgttcccattcagagcaccttttaccgggttgtgaagcccttgctcgagagcaggcacagctctgtttcttgcaggtggagtaagctctatagctcttctagatgaaaagccactgcctggacatttgtcaaaatgagacataagaaggcaggtttggattttttacacccatgaaggcccactgatggggccaattctgtcacttggtaactcactggggaggactaggcagccacagctacatggcaggtctgcagggccagcatgggagctgtccaacctgccaccaggtgaagaaagctacttgcaggaacagtagaataggtaagagttcatttctgtattaaaakatatatatatatatatatataaaatatataaaatgtgtaaaatcacatgaatatacgtagaatatatttttaaaaaatcactgggcatggctgcttactcctgtaatcccaccagcactttgggagggtgaggtgggaggattgcttgaggccaggaagtcgaggctgcaaggagctatgatcctatgatcatagctctactccagcctgggtaacagagaagatgccttctctaaaaaaacaaaacagaaggccgggtgcggtggctcacgcctgtaatcccagcactctgggaggctgaggtcggtgcatcacgaggtcagtagatccagaccatcctggctaacatagtgaaaccccgtctctactaaaaaatacaaaaaagtagccgggcgtggtggcgggtgcctgtagtcccagctactcgggaggctgagggagaagaacggtgtgaacccgggaggcggagtttgcagtgagccaagatcgtgccactgcactccagcactcccgcctgggtggcagagcgagactctgtctcaaaaaaaaaaaaaaaaaggaaaaaaaagaaaaccaaaatagaattaaacaaaaattctgggaaactgttagcactgattatctctaggaatggaatttggaagacaggaggactttctttttttgtactttctgtcctttaatgtactatttgaatgttttacccagtagtcattcagttttttttgtttttaacttttatttatttatttatttatttatttatttatttttgagatggagtctcgctctgtcgcccaggctggagtgcagtggcgcgatctccgctcactgcaagctccacctcctgggttcacaccattctcctgcctcagcctcccgtgtagctgggactacaggcacccgccaccaagcctggctaattttttttgtatatttagtagagacggggtttcatcgtgttagctaggatggtctcgatctcctgacctcgtgatccgctcaccttggcctcccaaagtgctgggattacaggtgtgagccaccgcgcccagcttaacttttaacttggaataacttcagacttaaagttgcaggaacagcacaaattactcccatgcacccttcatgcagattccctgttaaccttttaccttatttcctttatcttattctctctctctgtgtatatgcatatataccgtttataatatatataaaactatatgtgtatataatttataatttttttcctgaaccatttgaaaggaaactggagacatgatgctcatttattcctatttcagtttgtttcctaagaacaagggcacagtacacttctcaaagtcaggaaatgaacattgttataatactgtaatcttaaataataaaaccaggttttaaagctgggcacagtggcccacgcttgcagtcccagctgaggcaggaggatcacttgagctcaggagctggagtccagcctaagcaacatagcaagacgatcacaaataaaaccaggttttcaaaacagagagcgtgaatggtagtgaatagttgggcaccaggccatgcccaccccagcgcactcagtcacctgcctctccgtccacatgtgtagatgcagcctccaagcacgcaacccaggctttctttgactgtctgcgtgccgagatggaacagtatgaaattgaggtgaccgtcatcagccccggctacatccacaccaacctctctgtaaatgccatcaccgcggatggatctaggtatggaggtgaggcccggtttctcttttctcctatgaaaatctgtcggtcagccacagtgagacatgctgctcttacttcagtgattctttggtcattttcatttggaagagaacttttaaagtgaaaaaaacttgacagaggtgttggttctagatatggactattgaataatcttcttttaccccaccatggcctacccttagtgtgaacgtcaccattgcagcattcagaacaggacctctgtgggcaggactcaagggctaaaaggaagttgccaagctgaaatgccaacagacttccaactaacccattcgcasatcccgagtccaaggagtattatcggcatcgggattgagtgaattgacctcatggcaagtgtagggtgtttgatggtctgtctctgtcccataggcttgagaaatgactgattcagggccagtcttcaggatgaggccgagtgcagcagtctcagcaccttcatcttgtctcatttggagacagtgcagagctgacctgcagtcaccactcgcgggcagagcagctggccccagcatgcaggctcaggccaagcagagaccagtgtgcccatgatcactggagcccttggagctggtgctgcctccccatgcttggaacagggcctgctcacccctccagtgctgtcctgccatgtcctcctccctgaagtgagctcttggggtttgtgctgtgatgtctgccaggggcctcatggtcctgcgcccggcccagccaggcctgaaccaagactgcccatgtcctggcagcagctgctctctcacacagcaagtcttgttttccccacagtagactctatacagaggcatggggcttcatacagctttacacctgtttatacctagaagataccacttaaaaaattatctctgcggcatttaaaaataagctgtaatccaaaacttcctacttttctgcattaacaaaaacacagaacagacattggtgagggagctcaggcaatctggacaacttaagagtggtttcatatggctaggcactgtggtcaacacctgaaatctcagcactttgggaggtcaagtcaggaggatcacttcagcctaggagtttgagaccagtttgggcaatagtgcaagacctaacctccacaaaaaatacgaaaattagccaaccatggtggcaccacctgtagtctagctactcaggaggctgaggcaggaggattgcttgagcccaggaggtcgaggctgcagtaagccatgattgtgccactgcactccagcctgggcaacagagcgaaaccctgtctttaaaaaaaaaaaaaaagtggtttcacatggtctgtgctagtggccgctcctgtgtgcctgccagctggtcctactttgcgggcaaaattgtcaaattactagggtagaaggaacatcagttgccgttaatctaacactgcctcctaatctctcccagctgttccttctaacacctaaaacaaactaaggacttcttcctgtttctcatccaattaatacttgacatcgagaacagggacatctgtctgctcctgactcagtgagcttgtgcatatgggggtcaatagtccccacccacctctgtctggccatcctgaagccaagctacccaagataaatgaggtggcacaacatcccttagtctttggttgttctaataggcacacgtttcccaggtcaggaagctgcttttcaggtgcggtgtgagggggtcactctgaagcccccaccccgggctggccctgtgcctttgctgtggagcaccmggcagacagactcactttggttccaagccctaactgggatcctcagtctaccttgtttccacatcccacccacctctcgcttcccccactgacccacatccagctgcaaaatggttccctctttccttggagcatggaatcatcagggatggtggcacaccactggcttcctggccctgggaagagcttcatggtgggaaaggcagcaggctgacctgacgactcacatcagctccactcctcaagagggacctctgcttccaagttcatgtgtttcttttgttttatttattttagttatggacaccaccacagcccagggccgaagccctgtggaggtggcccaggatgttcttgctgctgtggggaagaagaagaaagatgtgatcctggctgacttactgccttccttggctgtttatcttcgaactctggctcctgggctcttcttcagcctcatggcctccagggccagaaaagagcggaaatccaagaactcctagtactctgaccagccagggccagggcagagaagcagcactcttaggcttgcttactctacaagggacagttgcatttgttgagactttaatggagatttgtctcacaagtgggaaagactgaagaaacacatctcgtgcagatctgctggcagaggacaatcaaaaacgacaacaagcttcttcccagggtgaggggaaacacttaaggaataaatatggagctggggtttaacactaaaaactagaaataaacatctcaaacagtaagagttgtagtcttccaggactagaaccttgtgtcctttgaattctcgccctgccagctcctagaaatagtttcaatcttggaatcagatgttatgtcacctgacccagttgtttctgtatttgacttaaacctcattgttgtggcagaaagaccacctccagtactgaggggagaaagttgtagtttcaagaagtcagcagtcacgcccatttccaggtccctatgatatctcatccaacttaaaacgtgggccagtatgtaatggcttatttggtgtatcccaagggatgcctgctttagcacctcataggaattcctgtttctctcttaactctcaccacatccctgtaggatgccaggcaccactccaagcagaaggtgaacttactaaagagagagcagccaaaagggagaggaggaccctgcgtggccccgtgcatcctctagaagtgaaaccattaaattggccagctgggcagactctacagcagcccctggtctggtggaagtgagccatttgttagctctaactagttggatcatagccagaaagaatgcctgtttctgcctttctgatttattaaaaatacattgttgaggctcactgaataggtcaagttcatttctagtgtttaggaggaaacttttcctattattgaaactgaaaattgaaatgtaggtccactgtagacttccccaaattggattacaaatctcctagcacatcataccgacatcttgcaccacatcccaactctggcgtcgttgagcctatattttatgaccattatataacatggtcagcaacatgttatttttttaaattttatttatttattttttttgagacggagtctcgctgtgtcacccaggctggagtgcagtggcacaatctcggctcactgcaacctctgcctcccgggttcaagcaattctcctgcctcggcctcccgagtaggtgggactacaggcacgcgccaccacacccagctattttttgtatttttagtagagatgggggtttcaccgtgttggccaggctggtctcaatctcttgacctcgtgatctgcctgtctcggcctcccaaagcgctgggattacaggtgtgagccaccgtgcctggcctgagcttgtattttaaacagctgccctagacagatgataaaaatggccacagccagtctttggttagggtgtcagagggtttcaggtttcctggttggtaggaggacaaatgggtgattagatctggtgacttgtcccagctcctaacacttcctggacgttccaggagcctctgggtaaaatgtggacacagatgtgatgggtcgttcttcattttccaggtaaattgtcaacctccctcctgacatggaagagaagggtctccttagtgttcacactggagacagtagacccaggcaagagctggaactgagacagcagcagcacctgtctaaagctcagcccgagtctaaggttgaatgaaagtgccgagcacacagcaggtttccaggaaatggcagcaatgaagggcgctctccctttagatggaaatgagaggacatttctccttggatgctgttggctgccacactcagagacacctggtgtccaggtgctgtcctttcctctccattatataacatggttagcaactggaggttgatgtgataggctgccctcaaaggaatgcaggtttaccaactgtgtactccgtcatcagaagatgggaacatcacatatgttgctgaggtttttggttttggggccgttgtgttctgactcacagctggggtgcatggagcttgggctagcattaaagagtgcttaacctacataccacctgtaagctgtaattggttggatggcagccagaacaaacacctgctttcacgtttttttttcttttttgttttttttttttgagacggccttggcctcccaaaatgctgggattacaggtgtgaaccaccgtgcccagcctctctttctttttcattttttttgagacagagtctcgctctcttgcccagctagagtgcagtggcatgatctctgctcaatacaagctccgcctcccgggttcatgccattctctcgcctcagcctcctacaggcgcccgccaccacgcccagctaattttttgtatttttagtagagatgcggtttcaccatgttagccaggatagccttgatctcctgacctcgtgatccgcctgcctcagcctcccaaagtgctgggattacaggcgtgagccaccgcacctggcctcttttttgagatgggagtttcgctcttgtcacccaggctggagtgcaatggcgtgatctcagctcactgcaactgccacctcctgtgattcaccttcaagtgattctcctgcctcagtctcccgagtagctggtacaggtgtgtgccaccatgcctggctaccacctttctaatttattaaaaatacatggttgaggcttactgagtaggtcaagttcatttctaaagtttatttcctcccaattaaagtggttagcaactggagattgacgtgctagaccagccagatgtcaatattattggttgtttacttacccaacattctaaaaacctcaaatcactttctaaaacttaactttataaactttataattttgccatataaatagaaactaacacaaactgaagaattattaaaatctagctaaataaagctgtttgccaaaggcagagtctgaggcccactgttcttgaggaggaggttggcaagtcccagaggggacctgttaaagtcacaccaacaccagacagacgctcttcttggcctcagaggctgaggactaaaagggcctgcagctgtgctctttcatgtccgtgttgctcctacagttgtcttgggtcgctggagttcagtgtcccttcctggagacagcaatggtttggataatgtgagacttagcctttagaattgtcccaacgtagcagctgaagtgacttcctgtgggtgagccccacgtgcattgctccaaagcaagaagcccagccacagcccggttcagctgatggcctttgagcaaccttcattgctcttggattttcaaaccagtgtttgaatatggacgtttgccagcagggttagcgatgctgccattccactttctcttttctgtctttagagggtttttgcccctttctctttcatccttaaattctgctggggaggtctaaaaagcacgatttttatttggttctgccttcaggtatctgatgaagttcaaagacactttccactttgctctttaagccccttggtgtttcacatcatgccaaaaccagagacggaaaaataaaaccaattagcttttccaaacagcagcatctccatgcagtgtagaggggccacagccgattagtgaatcgaagaaaatagtgtacagccctgggcaccctgcccacctcccagcaagtctcccttccttccctcagggcccagcagctgctgcaccagatgtgaaaactttggaggcagctgacagactggaacggggagatccagtttgatcagttgtccttttacataacagctcttcgctcttctctgaaattgggtggggatgggtagctaaaactaatttactagattaatgacacaatctattccctaaagtggtccatgtaggactcatttaagtggattttgcacaggagggccctggtaacttggtctttgctttttcttggcagttaccgaatgctgtttaaaaaaaagaaaaaaaaattggccaggcgcggcasstcacgcctgtaatcccagcactttgggaggccgaggcaggtggctgaggccgggagttcaataccagcctagccagcatggcaaaaccccatctctacgtggtgacgggcacctgtaatctcagctactcgggaggctgaggcaggagaattgcttgaacctgggaggcggaagctgcagtgagccgagatcgcgccattgcactgcagcctgggcaacagagagactccatctcaaaaaaaaaaattattttttggagacagggtcacactctgttgcccaggctggagtgcagtggtaagatcacagctcactgcattctcaacctctcaggcttgaatgatcctccctcctcagactcctgagtagctgagaccacatttgcgtaccaccacatctggctaatttttgtctttttttgtagagacaggtcttgttatgttgcccagactggtcttcaactcttggactcaagtgtttaatggtcctcctgcctcagcctcccaacgtgctgggattacaggcatgagctactgcactcagccttcaaatgctatttcttgagaagtactgtcgcatatcacagatgaccataagcaacttgtcagcagctctgccatgactgatcatctagcaaggacaatggcaggaacagagaagtcagcactgacagtgggaagggaggcacatttcttgctgccagcctcaggcacacgaaacccctgcctgcagtccacaccagcacctcatccccatctccctggccaggggccatgtaactaagatggcatttcagaatctaggttaatacatccaataagaatcacttggttcagtgcagcttgggaaatggtagaagagctacccatttgcagctggattctacctcgggggagggctcctgctcagctgacttgaggttgcctcgacttgtctggcttgtccagcttgtgccttctagtcaattcccccatgaaatctaacttgttggcagagcacttccaggccaggtatggggctccctttccaaacctgggcattattaagaaaaaaaaaaaccaaaaacctgcccagcaggctcagatgccagcactcagacacctgaggggtcatgggcagctgcatttcaactcacactgctgtcgagatgaggcatgtttttacgggatcagttgtgtggctaaggcagttccctctttaccattattccaggtgccyagagactgccacgtaaacagtggtgcacacccaacaccgtcatgcccccagcactcaactgagtgataagttatttctaaatctcttggaattaaatcaaagtttcttaaactttttgtgggccgtgggtcccttttaaaatccttaagaggtgtgaatctcccctacaaaaaatggcccaatcacccctcgtgaatccttcccatgcaccctttcattactctgtgacatcaggtcttcctgatggggactttaaaactaggtgagaaaccactttggctgtctcttaaatattggcctggccaggcacggcagctcacgcctgtaatcccaacactttgggaggccgaaccgggcagatcacttgaggccaggagttagagaccagcctggccagcaaggcgaaatcccatctatactaaaaatacaaaaagtatccaggtatggtagcacacagctatagtcccagctactcggggctgaggcaggagaatcacttgtactcgggaggtggaggttgcagtgagctgagatcacatcactgcactccgtcctgggtgacagcaagactctgtctcaaaaacaaaacaaaacaaaacaaaagactggccttcagaaggaggtgccatgtggctcttcagggatgaatggggctttaggaaggcagaagtgaagacaggcaccccagcctttttgtggaagagagaatttcccatttacccaaagccttagagcaagcttgtccaatcaccaatcagcagcccatgggcctcatgcagcccacgatggctttgaatgtggcccaacacaaatttgtaaactttcttgaaacattatttttttgtgattttttttttttttagctcatcagctgtcgttagtgtattttatgtgtggtccaagacaattctttttccaatgtggcacagggaagtcaagattggccacccctgccttagaggaaatgtggcaggtgacacagtctaccttctggtgtgagggagaagcaccggcttggctcctgtggaacagcgagcactgaggccagggggtgcttccaagattgctccgagggctcttctgtcagcctagggcaatgggttaataaactcatggtccacagtaggaagagttttggtgcttcaaagaaaacacaggtgttcagatctctgaagagcgatcctggagcccagagttccccacgtgaactcaagtggacacccaaaggcctccaagcctcgtcaccttatcctaccatgttcctgaacagcatggtgg

SEQ ID NO: 95436 - DNA, 134550 bp, Homo sapiens
  misc_feature (1)...(134550): n = A,T,C or G
ttctaataacaagtctaatgtaattcctatctttgttctttcctgtgtattatcttttttttctggctgatattaagactttcgcctggtttcagcaattttactataatgtgccttgttgtggttacaattttttattctgcttcgtgttctttgaatgccttgaatttgtgggtttatagtttttattaaatttgggactatttcagccattatttcttcaaatctcccacgctccttttaatataggcaaattcattttcagtaccaagatgacaccctcctgaggactaaggacaaaatgtacagataggtctttccattcggctggtgaaaacaggcacaatttccattcatatgggagctctgggaattgtttttcctgcccttttttggtggtttgttttcccaattagtttccaattagtctcttcttaaatatgtgcaaatcaatgctcatccaaagaagcaaaaggacccctctgtagatatttggagttgtatatacatatgtagctttcccctttctggttctctgtcctccaaactttagctacgtcggcctccctgaagcctgatatttgtctcctcaagtcagcagtattgctgggctttgggctctgccactgcctgtcccatggtctggaaactgttgcaaggcagtaggctggggcaattagatggctcaacttgtttacttctcttaccttaatcactgtcctacactgtctattgtccaatgtctaaaaaccattgtttcatatattttgtcagaaaaccattattattttttttccagatgtttaagagggaaggataaatccagtccccatgactcaattgttgtcagagcaaatgttcatacctggaaagcattttaaaatacagagccaaattaatctctcagaaattcggatctagtaggtctggtgtggaattctggactcttttacttattaaaaagtactgagatgattctgatacactgagagtgttgtaaaccatatcttgatacctcaagcagagccttgttcagacatttttttttttttactgagggggaaggcaagatcatttcatatgaaaaacatttcctggttctgagtacgatgggggtacttatagccaaccaataatccagctgaaaacaattaggagagccagctaaaacataaaacatctgtttgaaggctgctgaggcaaccagaacttatgaggacacaatctcagagaaggggaaactatacatagaggtgagctgacattcagcagtaccttcattccttggggaaattctgggcataaggccagagtctgagttttggttctgagtatagaaagaggccctaacaggcaaagacaccaccagggatgattctgtcagttcagcagagttggagagacaaacttaagaacaagaggggccagattcccagtgagaagggaggggtaaataattgagcccaataatgtcagtctccctcaagtcattttccaaattctgaagatgcatgagacagaaggttaagaagcttagcagaaaggctctgaaaagcagagtgaagagattttgaccgtctcatggttttgcagaaacaagaattagagttcagtatccactgggatgaagggtcccagggaacacacacractctcagttggaacccctggaggcttatgctactggagcagcagcaaaaaagaggtgaattaaatcttgccaaaacccaaccccaagttaactcagtctctggttgattaaggtggttagctctcactctaaatgctttgcaaaggacagtaggaatccttctctggatgatgataatactatccagagcctctgcaatttttcatacttgaaagtgtgacatcctattaaaaattctcaggcaagctaagagccaggaaaaaaaatgaccgaaaccaatggaaagaatatacaatagaaatagatccacagaagattcagctattgtaatgattggaaagagctttaaaatatctagggttaaaaaaaaatctaggattgatatgttcaagaaaataaaggcaacagcagagaaaatacatatataaataaataatttctccaaatgaatttgattttaagaatcgtatgaaaattctagaacttaaaaatataataaacaaaataaagaattcacaaatgggtttaaaagtacacaattaaatagaaaatataccgactcatgcatagagaaaaaaatgggggaaaaaagatgataggaaatacagatggtaaacaatgaaaaattctgacatatgtataatttaaaccctaaaaggaaaggagagagaagagacagtgatcaagaatttcctaaaagatataaacccacaaatgcaagggactccgcatacacccattgcactcatgaacccaagtaggataaatacaaagaaaaccacatctacacacgtcatagtaaagctgttgacaaccaaagacaagaaaaaatcctaaaaggagtcaaaggaaaaaagacattactttcaaaggaataaaagggagtgacagaaaccagaagacaatggaagaacatcttcaaagtgctgggaaaaaaaaaccaaaaaacaaaaaaaacttgccaaatcagaatgctatacccagcaaaaatatgaaggataatgcaaagttttaggcaataaaaccccacaaaaaacaaaaagcaaaaactcaaacaaccttggagagaacttgtcatcagcagacctgctgtaaaacaggggaattattcaaatagaaggaaaaccttcagacagaagcacagaaatgcatattggaatgaagagcaatataaggataaatatggaggttaatctaaatgagtacttattgtacagaacaataagtataaattcttgtgtggcttaaaatacacacacaattaaaatccttgacgacaataaacacaaaagggagatgggtaggtggagatacagtattttaatgtcttagcattcccggggaagtggtaaaagtaattattttgtataagatcataagtcaaaaagcaatgttgtaatctctaaaactagtaatgtataatttaaaaattaatagagggggttaatgatatagttaaaatattttaattaattcaaaagaaggcaaaaagcagagaacaaggaatgtgaaataggtgatccaaaataaatggtaagatggtaggcatacatccacatataccagtaattatattaaatgtaaatggactaaaaatgtttcctgttgaaaccaggacagagcaaacttccaatttcaggctggcatggactctgtataagacacaagtaccaagtacaagtgaaaaggcagggattcctagagcaaaatatgcaagggggaaataacctttagttgccagctccacagggctgaatcgtgagtaaagtttgagctaagaaaaactatcctttcagagtgcagattgctttttaacttgcaaatgatgaggactttaatccgtctttgttgcaagatttttattttgagaagacctcctgaatgtgccatttagttatgcaaatgtaaagcagagactctttatggaagctgtgtgaaaagctcaactgtgctttgttgttataaattgttttaaattcttgctactgtttaatccccagtttggtcttttcacaggatggctgtggctagttttcttccaaattatccaaaagtaaacacaactcatctctgtattatttttcttctgaaggccacacactctagtctcacatgaagaactcattgtctttgcattaatatgactttatctgccctctttgggaaataaaaatctgcctattctactaaaagaaaatatatatatatatatatttttttttttttttttcctggaggtgatttcattacaaacagggaccattttacctgagaatgtgtctgattcatctaggatgaaagagatcctttctattggattatcatgtattccaaatttctctactgctttggagatggggcttggaagtaggcgatgaatggcaactcagtcaacctcactannnnnnnnnnnnnnnnnnnnttgctgtgtctctcaggctggagtgtagtggcgatcatagttcactgcagcctggaactcccggggctcaagcaggcctcccgagtagctgggctacagcagcgccccgccacaaacggctttcttaacggcttaaaaaattgttcattcacgagcaacatttttttattttaaaccgcctactacagtacttgtacaacattattctaggtgctggagatgcagagtcattataggagagcatttaccagtgaatgtattcggaatatatatatatatatcacatgtaagtgcaaaatgactagagcaaatgatactactacagaagttcagaaaaggaagtcagcatggaagttaaggcagtgggtgagagggaggcccttaaaagctaaagctgagataaaatgaggtattgcgggcgacagtctaggcggggtgtgtcgtatggggttggggacagggcagataaaggtcaggcagcaggatacacgtccatgtcaacgattaaacatttagtgtctttttcatgtctactgtctttctagtgaatgcagaaaaaaaaaaatgcatgacttggccaggtgcagtgtctcaggcctgtaatcccagcactttgggaggccgaagagggcggatcacttgaagtcaggagttcgagaccagcggcctggccaacatagtgacaccccgtctctactaaaaatacaaaaataagccaggcgtggtggcgggcgcctgcagtcccagctactcaggaggatgaggtaggagaatcgcttgaacccaggagacggaggttgcagtgagccaagatcgcaccacttgcactccagcctgggcaacagagcgacactgtctcaaaaaaaaaaaaaaaaagtatgactcagtctctgcatcaaagagtttaaagtagatgaaaggcaagacaaagaaacgtccatacagccagtagtggacaggcaggccatgaagaaccgcctgctcgtggttccaacgccctaagtatggacaagagttccgcacagggcaagaagggaagaccggctttggaataagacaaatctcagtcccaggctcaggtgcgcgccacatactagctgtgtgaccttgtccaagtcacacgacccaggtctgtggagtctcccataaaatggctctagtgaggtccaagaaccctctcagctgctgggggagggaagaaatgaagtcactgctgaaaggggttaagacgggtgcttctggttccaccctctccccaactcttcccaccgacacaggagagccgtcgggggctgaggcgagctgccaggggtgaggacgggaagccgcctcctctccgccccccaggccccgccctcgggctccggaaagtcgctgtgcaggcaaatgagtggggagggagggctcactaactgtaaacagacgccgccgagagttcccatcctgcgtggctgccggatttccgtgccacactgaagccaccccacccagactcctgccctcagtttccccagcggtggcatggggtgcaccagctcctcctctcccgggtcgccgtctgacttaaacgcgtgagacgggagaggaggaacccccgctccccagcctccagccccaccaagtcctcctcctcccctggctttggccttttgtaccggccccacgtgaccccgccggccggctcttccctgctgccccgccccgccctccggcctttcccggctctcggcccagctcttcccgctctcggccgccccccacccgcgctgccgggcctccgcctcccctcgccgcccgcccaggctcttccagctccctcccccaggccgccgttccctcgcgacgctcccctccccccgcggctgttccgccgccttgcctcccctccccccggctggagctcactgtctccaagatggcggccgtgtcagtttggggcatctccgcggtccggcccggggccccgggatctcggctgtccttcctcccggtaagtagccgaggggccgttcccggccgcccccggccgcccagcccgaggccgagccgctccagggcccactccgctgcctcgcggggtcggcgggccgctgcaggcaaattccaccacagggcgagatatcagatctccgnnnnnnnnnnnnnnnnnnnnnnnnnnnnnnnnnnnnnnnnnnnnnnnnnnnnnnnnnnnnnnnnnnnnnnnnnnnnnnnnnnnnnnnnnnnnnnnnnnnnnnnnnnnnnnnnnnnnnnnnnnnnnnnnnnnnnnnnnnnnnnnnnnnnnnnnnnnnnnnnnnnnnnnnnnnnnnnnnnnnnnnnnnnnnnnnnnnnnnnnnnnnnnnnnnnnnnnnnnnnnnnnnnnnnnnnnnnnnnnnnnnnnnnnnnnnnnnnnnnnnnnnnnnnnnnnnnnnnnnnnnnnnnnnnnnnnnnnnnnnnnnnnnnnnnnnnnnnnnnnnnnnnnnnnnnnnnnnnnnnnnnnnnnnnnnnnnnnnnnnnnnnnnnnnnnnnnnnnnnnnnnnnnnnnnnnnnnnnnnnnnnnnnnnnnnnnnnnnnnnnnnnnnnnnnnnnnnnnnnnnnnnnnnnnnnnnnnnnnnnnnnnnnnnnnnnnnnnnnnnnnnnnnnnnnnnnnnnnnnnnnnnnnnnnnnnnnnnngctgtcagcccagccgccgaggggaggccgggcgcctgtcaacctcgcggcttggcccggtgcgcgactgtcaggctcccagcaacccgcgccgccctcgagccggcccccagagcttagggtgcggagctgggccggggctatgcaccgctctgaactccttcacgtgatttcattgttaacttgtgctcggggtctgtttccatcgcgtggaaacggtgcagcgccccgtcggcgagctgccgggctgtgcagatccaagtttttaaagtttctcgctctttgaaaagagagcgcgaagacgtgtttaggggtggggaatggggacgggaaggactgtcggaagcgagttgcgctcgctctagccgctcgtgtactttccgggagttaagatccgaggctgcaggcgcttgactttccgaagacctggagactgatgacaatcccgactggaaagacaatgagtgactgtcactcattcttttacctgcgaagcttagtcaattaggacgttcgttcccagcttgttaaactcaggatgtagcttctcatttagtttagacttaatatctgtataatgagcttacttggagtaatgatactctgatttctatcctcttgagaccctcaccaaattgaagcatgaytctcccagggggcttctttttaggcagctgatttaaaaacaaatcttggctcaggtttgaatgtttgcttcactcttttctttcctatcagagttaatagtaatatctctttcctagtgtgtattagttttccgtttgattttaatgtcactaccaagaatagttgctgtgggagccatttgtctagcattgtttatattgtaatgcaaatgatctccagaatgagagcagaagttctaaaaaacacttcagttaaacttatttttggaggcaaaagagttagattcagaattcagtactttagtgattaaacaagattgcatctaccagattcttttatagggatactgactttgattcagagagacagtacatttctgtttatgttttattaatgttcgtttcaggacagcaatcttgaatttatatctttattatttgggcttctctttagtcctacaagtagccagtgtatttctttttctgtaccgtccgtttgatatgtagtatgtgcgttgaccccagtgattctgggccttcctcatttctagttttcctgtctgaattacttacacgcagtttgacagttgtgactctcttcagcatatgaatagaaacatcttagtttgggttaggagaagctatcagcatgtaattcttaaaatttgaatgaaagtggattattgttaaattcagtaagcacttttactctaggctattttcaatagtatttttgtttccattaggagagattaaggtaatactgtacttaaattataaactgggtgtgcatattgtattcattcttttcatgtaagaactaaaattttctcagtcgttttytgccttattgactgtttttgtctactctgaatgtctagaattttgaaagatgaaagattcacttttactttcattgcaggattctttctactaatccagatacttgtkgaagtgctgactagtttcttggggaaagatgtcaaggaagagttgaaattcctagactggtgagcagagattgcggagtacagaatagccatcacccactctggttagtggtagcttaaaggtcattcttagaacatgtcatcgtgtttcctcattgtatcctaattactcatcttttttttttcttttctttttttttcttttttatcccaatggtttacatacatgattgttttggaatattaatagataagtttggaaattcttaagggtgcctagtaaacacttgctgtttgattgctttatgatgaggatgcttattttcattcgaaataggtcttggtagaaaactgaccttattttcattgcttttcaggcataagatgcacatttttctgctctggagccgggaatgaaatattcttgagttcttacaactttatgacgagacccatgtgtggtgctattgagaaattcattgggaagttggaagacatttcaawcaacaggttgttttggtttctatagtacaattggggtggcattctgttttgtgaaaggaggaaggacttaggccagaaaactcatatgctatggttaactggttcccagcctccgagaatcttgttttccatggtgtaaaacttactcagcatcaggataagggataacgactctatggatrtacagaatccttcaccatggtaaaactcgcaaacccgctttatactgagtggattttggaggccatcaaaaaagtgaaaaagcagaaacagcgtccttcagaagaaaggatatgcaatgctgtgtcttcatcccatggcttggatcgtaaaactgttttagaacaattggagttgagtgttaaagatggaacaattttaaaagtctcaaataaaggactcaattcctataaagatcctgataatcctgggcgaatagcacttcctaagcctcggaaccatggaaaattggataataaacaaaatgtggattggaataaactgataaagcgggcagttgagggcttggcagagtctggtggctcaactttgaaaagcattgaacgttttttgaaaggtcagaaggatgtgtctgcatyattcggaggcagtgctgcctctggctttcaccagcagttacgattggctatcaaacgtgccattggccacggcagactccttaaagatggacctctttatcggctcaacactaaagcaaccaacgtggatgggaaagagagttgtgagtctctttcctgtttacctccagtgtcccttcttccacatgaaaaggataaggtaagaatggcatatgcttcggggtttatagagctgatgatataggatgctacaaattcacatttctgggaagttatattcaagttttttgtttggggacttctgtggagtgatcacctctggttttttattggtgagttgtagctatgagagcttcatagatttgttctggtactttgaaatatttgaagcctaagattaaaaatgtagaatgttaatctgactaaaagaacttatttacattacaatgaaaaagtgacatatgagtttaaaacttttttttaaatttttttttattattttgcttgaggagtactccagcgtgagactttaaaactttaactaaaggttcttagaacaccttactactggaagttgatgagcagccaaatcatggagacttgaatttgaaacaagcagatgactctgagaacatttttctgttttccattttgttgcagattactcgttagacagaaatgagacagattctcatgacccataggcgcaactaagcaaacttagcaattcttgtttctgctgtttgtattatagctttctgtcatgtattatggctttgcatatgatgaagtcctaaatgctatttatgacagctgtagttgcatgggacaggaatacagtatcctaaactagaaaagttctggagggtctggaacagtagttcatgcctgtaatcccagcgctttgggaggctgggacaggaggatgtcttgagcctaggagtttgagcccagcctgagcaatatagcgagaccccacgtccaccaaaaatagaaaaattagccaggtatgggcgcgcctgtagtcctagctacttgggaggctgtgtcggggaggattgcttgagtacaggtgtctgaggctccagtgagctatgctgtcaccactgcactccagcctggacaactgagaccctgttctaaaaacaaaaagaaaggtaaagttctggagagttgggagttttgatgcccagatgtgtactttactctgttgtgttttaggatgttattgtatatagttgaaattatgacttcttaaacagtaaattttggtgcttaaatagatatttggagattaggagaattttgttagtacctgttttttacattgacctagtatcttagctgtaaatttacttaaggtgctctgaattatagttccttggagagcagtgatgctttaagttgctgcacaccttggtagacataagtaaaatgatcttcattttgcttaagatgatggaggatactcctagggtggaaagatggtaaagttaacattgaatgtattttgaaaattggagatttgatctcaatttgttgtattattagcagcccactgaatacctgtagatttttctttaacaattgaaaattaacggtatttttctttgatgaaatttttagagatctatttcagggttcaattttccctgtgaacattgaaataaaacataatcttactgttattacccttgaaatgattctcatacagtcatgaattgatagagaatctcattcataaaatggctctatgtaatttgagcatttattaaaagtatatattaaaaattcagggtagacaagtaattaaaatgctttattctatatttaagtgctgtaagaactcttacctgtagaaactttatcacatgtggctgaatttaaatacagttatcggatttctacaattattaaatgatctaacaggttaactgcctggaaacaggaaataatttatagttagatcagttcagtgccatacctgtgaattggatgttataagttcctgttaggccacctgtttgcttttatttatttatttttgagacagaatctcgttctgtcacccaggctggagtgcagtggtgcagtctcannnnnnnnnnnnnnnnnnnnatgcaacctccgcctcccaggttcaagcgattctcttgcctcagcctcccaagtagctgggattacagacatgcaccaccacgcccggctaatttttgtatttttagtagagacggggtttcaccttgttggccaggctggtctcgaactcctgacctcgagtgatccacccgcctctgcctcccaaagtgttgggattacaggcttgagccaccgtgcctggcctgttgtttgcttttattgtaattacacttgcttgaattatcaatagataattttaaaaaatattagctatataaaaatgtcatttgagcatatttttaaaaggtagtaaatatagtacagtgcaagacaaatccaagtcctagaaccctgagattttacttttggaagggaccctgagaaccgtctaatccaagtccttattttgcagctgagctaaggacctttgttgagaccatttcatagcacctttgcattaagaaaagtttaattcagtagagatgtgctgttttgctttgactggagtgcagtggtgtgatctcagctcactgcaaccttcgcctcccgggttcaagcgattcttctgcctcarcctcctgagtagctgggattataggtttgcgccaccacgtgtggctacttttttttttttttttttgtatttttagtagagacagggtttcaccatgttggctaggctggtctcaactcctgacctcaagcgacctgcccacctcggtctctcaaagtgccaagattataggaatgatccaccgcacctggccacatttgattttggagaaataaagcaagaaaaacaaaagtgatttaataattgaaaaaatgaaaaagaaatgcccatttgcttacatrgctttcatatatagtgtttttttgttttttttttttttttgagatggaatttcgctcttgttgcccaggctggagtgcagtggcacgatcttggcttactgcagcctccgctgcccaggttcaagcaattcttccttctcagcctcccatgtagctgggattacaggcatgctgaccaccatgcctggctaattttgtatttttagtagagacggggtttctccctgttggtcaggctcatctcgaactcccaacctcaggtgatccgcccaccttggcctcccaaagtgctggcattacaggcatgagccaccctgcctatagtgttaactgaagtaactaaatttagacatgttggaaaatagagtttgtttcttcaggtagacttgtatatgtactaatctcattggaaaactaatttcatgatagtatctattcaattagagttggtgagctctgttctatatttttaaatggagtcttattttcagtagtgaatttcctgtgtgacttcccccaaagatatgaaaagtttacattaaaaatcgtaatacagtgaactctaggatgagagattattcctttgaacagattatgtctgctccttttattgtattttaactattttctttcctctccttcgaactacgcagtcagttgctatgcagaattgatagtttgctgttacgaacctagatgttctcaaaaaaagaaaagaattatccagagtttatttgacagtgatggagaaaggaaggtgtataggtcaggagtagtttcacttttaggaattaattggttcagcatatagtcattgagcacctactgtgggccaggcactctgcttggaacagaaacagttctgtcttctctgggatgctaatgcaggtatttctattgacctggccaactgtaaggtgaagatgaaattcaaagactgcgtggagtaacccgagcaagttcctctttactttttctggtatcaattctaactttttgtttttttttggtgatattaacctttggaaggaactgtatgttagattttcggcagctgagtggttttgatccttttgggagatcaactgtgttggaatacgtttaagaggagtttttgtgaagacattggaactttagtgtgttcttttcacattgataagtactgaggagaatccatgggatactgtgattaaaagtttttaggccaggcctggtggctcaggcctgtaatcccagcactttgggatgccgagkggggggtggatcacctgaggtcaggagttcaggaccagcctggccaatatggtgaaaccccatctctacagaatacaaaaatcagcccggcatgatggtgggtgcctgtaatcccagctactcggtaggctgaggcaggataatcgcttgaacccaggaggcggaggttgtagcgagcctagattgtgccactgcactccagcctgggcaacagagcaagactccatctcaaaaaaaaaaaaaaaaaaaagtttttacccatgttataagggaaatttttgagctaactttagagtgtggtagttaatggtgagtttatttattaaagtgtttatttactatgtgccaggcgttattttaatgctgtatatatattaactcatttaatcctctaacataactagctactgttaggttagttagttattaataacataacagtaccagcagtgaaatagctactgttattttacaggtgaagaaactgaggcataaaagagatttcagtaacttgctgaagtcacacaaatattaggtggcagagctgggatttgaatttgggcagtctggctccagagtctttgtaatagccatactgaccacctcttaggagcagtaatgtatgatggctatcactgcactcaagtacagaatcgtgaatgtccttggtgttaacttcatagcacatttcctaattgttaaaggacaaattcccgcccgtcttcattgtgtccatttttctttttttgcagaacagatttgaaaattcactttggaccagtgataagaatgtgttaggaaccaaagattaggagtaatctagttttgtatatctgaggtccattaaaaaaaagtttcacctacatgccatttttttcccttaaagataatttctgtgctaactaattttcatttcagttgtcactaacattttctgataggcaaggtagggatcagttgtattgctataccagagtgctttaatttgggacagaaatactgttttccttgaatcatgggattataggtgaggagaagagtgtgtaactggcttaaatagcatcttcctctttgtaaatttctttttgaaatatagatattactgtaaggtaatttgttccatttacttcagttattcattatttatttagcaaacatttgaatgcctgccatgaacagtggatttaagatttaggtcctgtgaggggattaaagcagacagaatagagatacaaaataaattttttgaaagccttttttagtttatgaactgtaatttttttacattattattttttcataacaattaagtatcatgactcagaaataataatatgtttagtgggcaaggcaattatttgagactgtgatggtccatttaaaaaattatctttatatagtgagtcttggaaagattcaatttcctttcaagaatagttttcaccttgatttcaaacttctgagttcatttttacacactgacataatttacttgaatatatatagtttgtgttctgtattactagcccagaaaaatattctctttcatggtaatcagccagatcattaaaagtattgttatttggtggcatagtattttggaacagaattataatttgctaaagcgttcagttggacagggaagagtaggtattgtcaactaatgttattgttcaggttactcccagctgggtaacctggagcagaaagatccaatgataaatctcttgccttctactctaagttacatctcaatttggtcaactcttagtagagtccaaattattttgttttattggaatttatattttaaattatagaggaagtagagctttgacaggaatttagaatttaaattttcgatgtagagatactgattaaaatggggattttttttttttttttgagagatggagtcttgctttgttgcccaggctggagtgcagtggtgcaacctccacctcctgggttcaagcgattctcctgcctcagcctcccgagtaagctgggattataggcgcatgccaccatgcccggctaatttttatatttttagtagagatggggtttcaccaggttggccaggctggtctcgaactcctgacctcatgatccgcctgcctcggcctcccagagtgctgggattataggcgtgagccaccgtgcccggccagggatatgtttttaagttactgaaagttaagagtgatgaagttttgatttagctatttggaaatgacctttatagtagaatagttgcacattttatatgttagaatggtggtattttataagaaaattgttaaccaatataagcttggaaatttcaatttcaattactctgttgcgttgatactgtataaaaaggcaataaatagttgtccatgctattaaattcagggctatgtggactgcttgacagaatgattgttcactttggaaaaacaaaaaaaacaaaaaatcttctgaaggcaaaagataaaatattgaggatacagtgacgtggaaaatgtagctattatcaagtgtgaaatggattgatctcagtaattgttatatttaataatttaaacattttttatgacatgcatttcttttcttttttttttttgagatggagtcttgctctgttgcttaggctggagtgcggtggcccagtttcagctcactgcaacctccgccttccaggttgaagcaattctactgcctctcccctcctgctgtctgcgattacaggcgtgtgccaccatacctacctaatttttgtatttttaatagaaatggggtttcaccatgttggccagttgtgttctcgaactcctgacctcaggtgatccgcccacctccgcctcccaaagtgctaggattacaggcgtcagccaccatgccyggcccatgccgtacatttctgacatcattgtttataccatttgtttgtgactccaaatgtaccaggagcagtggcctagaaataaaaatttgttactaacaagtcattgaggtggattaattgtaaatctggttaggaattaattttgtcttagcagatttattcttcaaaaattcagaaatttaaaaataactcagagatatgtttgtaaaatagtatctgtttaagtacaatcagctgcacagttttttttttttttttttttgagacggaatctcactcttgcccagactggagtgcagtggcgcaaccttggctcactgcaacctctgcctcccaggttcaagtgattctcctgcctcagtctcccaaatagctgggattacaggcatgcgccaccatgcctggctaatttttgtatttttagtaaagatggggcttcactgtgttggccagacgaatctcaaactcctgattggcttcccaaagtgctgggattataggtgtgagccactgtacctggccaactgtgcagatttttttgatcttctggttcacctatgagcacaatgatttttggtaattttcagtgcatgacatacctcgaaataaagctactgagctactaaagcttgggttagccattactaatccaaagttctataccaaaccaatttttcttttctttctttctttcttttttttttttttttttttttttttgagacagagtcttgctcttgtcacttaggctggagtgcaatggtgcgatctcggctcactgcagcctccgcctcctgggttcaggcgattctcctgcctcagcctcccgagtagctgggtttacatgcacccgccaccacgcctggctaattttttgtatttttagtagagacagggttttgccacgttggccaggctggtctcgaactcctgacctcaggtgatccacccgccttggcctcccaaagtgctgggattacaggtgtgagccaccatgcccagccaccaatttttcttatgcttacaacctagacatttttctagcgaataagtactttactctttcttggtctaccttccaattggtgaaataaagggaaggaattaatgaagacatcgggtaccacaaatggcttcaggaatagaaatccagaggttctaatggtcttaacctcgttttttctttgctctgtatcaataggctaagggaacgtaaagagttgcttatagaaacctattaatagctaacatttgttaagggctgatgatgtgttagggacttttttttttaagtgttttaacatgtactttcttattgaagtctcaaaagaattctatatgattaaattttataggcataatatatttatataataggtatttaatagtatttaatcatacaaattttcggcagggcgcggtggctcacgcctataatcccagcactttgggaagccgaggcaggcggatctcgaggtcaggagatcgagaccatcctggctaacgtggtgaaagcccgtctccactaaaaaatacaaaagaaaaaaaaaaaatattagccaggcattgtggcgggcgcctgtagtcccagctacttgggaggctaaggcaggagaatggcgtgaacccgggaggtggagcttgcagtgagccgagattgcgctactgcactccagcctgggtgacagagtgagactccgtctcaaaaaaaaacaaaaattaataataataatacaagttttcattatgtcttatagaaaaccaaatggaaaatgaatataaggaaatgcaaaatacattaaatttctttttacccttgctgcctgttttttctttagttcatcctggacttgtgggccaatacttttttgttatgtttaatactaggagagcaaatacataacaggaactgtgatgaatctggaaagaaaatttatatcattcagtcttcctgaagctgtaagaatctccttaacatctattagatttattttctctttgcatttaaagttttggagaaaatatctttgtcatactgacttggttcttagctatgtaagaggactaaatctaggtgcggagtttgctggtttaaatagaattaaaaatttatttttttctggtgacctggagagtgtttcttaaaattataataatgaatacttttcatgctctgatttatgtataggaattattaagagcttcactctgataaagttatttaccacttggctactcaggggtggagtcatttcacaaaggatctgcagcgaatgaattagaccaggagtaacttcacccttctgcttgtcccagctggagcaggattaggactcattcagctgcagctggttcccaggaaaatgaaagcagttccttctggttttttcctttcatatgaaagtcatagttcccagcagatggctttcatcagccctgtacatgtatctgtaaattcaaggccaaggaattattttcaacttcattagggaacaggtgaagaaaccatttgtagtgtggcactattttattaggagttgaaattaagcatagagattatagtagtatgccattctgggtcaaaatagtttttaactgtcagcaatttaaagaaaaaaaaagactgctaaggaaaagtaagtctggctgtagtgttgattgaggtatcttttatggttgaattgtattatgcttacgaaacatagattattagaaaaaaagacttgtatcttctgcattgtgtagaatgttcagccagtagcaatcttggatcacagtgattctaatctgatttcacaaataatagggaaatttgagagccaaagaggttgaagtgtcttgtccagtgccacacagccagttaataccatctggaagaattggtcaggcccttctcaattttgtgcttttttcattatgctgtagtactgctttatagtattagagagcagtgagcctaaaataatttagttagaattctcttccttaatggaaaccatagaataaaccttgtctagagaatattggtggtatcgtaaaccacaaatatataaatctgctatttcagtgtgtgaaaatagctatacactcttgttagagttttgaaacaactttttgggaaaagactgctttcttatggcccaagttagaggaatcaaggttttcttatgttgttggctaaatattagaaggggaacatgttgagctaccttaatgctggaagaaaaagtactccttgagttttgggaaaaaaagtccatttaaaggtaagtctaattttcagtaggtctgcaacacaaatgacctctgagtgacttggatcattggttagaatttaaaattcttgagactgagctagagatagcaaggtacaaacctttctattaattaatgaagtaatttttaccaaagacattaaatatgggtggaccaaaagtgtatagtctagcacttctataaacatagtgtctgggaggagcttgagagatttgtaatgttacttgtaaacagaccgtgtggggaagaccgcagacagcacatcattttttgtctttattggtctttatgactaacacttcatctctgcatcacttctgctttgctgtaaaacttagcaagtacattaggatagtggcaaataaagattaagattgaggacagwtgtttgtaaaataactgggcgattttaagattataggtgtaacttgttaagaagaagataactggtgtggaaataaaatctggcagccaaaaaaaaaaaaaaagctttcaatgtgttaaagaagatagttgcttcttttgccgtttaccttttatgtagaataggtgattccgcagatctagaggtgttgtcagacttgtactatgggctgcgttttcctccagggaattgtgaactgtagttgacctgaagagctgctaagtgttggtttttaattctttgagcttagtaaagtctaggttccttttttcttagtcattgggtacagtgaagcatttaactcctgagttttctagaacctttaacagaactctcagaaacattattactatttttgtgtgtggagtgtgattctgtactttaatagtttcccaatttttctattcagggcatctttaaatatctaacttactatttaaaccctctttcaccattttcctgccttacttttttccatgccactcagtttttctttaattctgtaacataaatccaaagccttattctttggaaagcagtggtacttggcactaaawtcactttagcattacctgaggaagcttaaaaaataaataccaaactaattaaatttgactagtagtgaggcccaggtttcagttttttttattttttatttttttaagaatgtttatctgatgtgcagctggggttgagaaccattgctctaatgcttagaaccaacatctctgtagtggggactggctaagagagtcagaagacagaagaagcaggtactttttaacctcataattgacattcaaacaaatgatgaaatagcatgcttcacacacaccctcatgaacacactttggacccaggacagtgtacttctggaaatgtacattctgttttattgtcctccctggctataactactctaatcttccacctttctttctccttaccctcactgctttatctcaagaagatcttgtgtggtatatagttgcgagaaagttacctgcatgattccgacaggtgccctgccatcactctaatgctgttctcattgcttggccttatggcacattctcactcactcactactcctgcatcatgttggcaaactccagccatttaccaccttctccttttttttttgagttggagtcttgctctgtcacccaggctggagtgcagtggtgcgatctctgctcactgcaacctccatctcctgggttcaagcgattcttctgcctcagcctcccaagcagctgggattacaggtgcctgctaccacccctggctaatttttgtatttttttagtggagacggggtttcatcatgttggctaggctggtcttgaactcctgacctcaggtgatctgcccaccttggcctcccaaagtgctgggattacaggcatgagccatcgtgcccaacctctctgctttaactttggggaaaatctcatgaccatgtggtgggatgccacttacaaatttgtggcctccaatctgagctctgccctctgcttgaagatgtatgtctgtgtatagtctgttctgtctgcagaaattcagtatttcttcccacctttttttctcattttcagtagatactcccatatgctacatcatagagataatggaatctgtccaattgagctcattgagtttatacccctctcatgccatcctaaatacatctgtgcttatttctgcccgctttgctaccttgtcataggacagtgaaagaagtgtgaaaggctcatctctccattctttttcaggaccccattctctgctacctcaggggccgtgtgccatcaaaaatagtcccattttttgactctatcatctttctcgctcactttttagtccttagcaggcagaagactctcccgttagagtaaaaacaaccaaaaaaccactgcagatccttctttctatgtataccctgtctgtttccattcatttttaaacttcttgaaaaaagtctatattcattccacgtctgctgcaatctggcttttggccctagagcagcactatttgaaactgctcttgtggacagttttcagtcttattttacctgagttctcagctgcatttagcatttgttgaccattcttccctttcctctgggataattcttagatgtctcccccttcctcccatctttctggtaattccttttcagtttattggcattttatcttttgcctgtatctagatgttggattccctaaggttctgttcttcactcatttcttactgttttctagagagttatctagagataactttcctgagttatttctagacctctgtgttctttactgatgactctaatttcatatcttaatttgagagctctcttctgatctctggacttgtatattccattgtgtagtattttatgtcagtctcttcagattcacaatggctcagatggaatttatcaacttcctttaaccggctgtcatttcttacagtggtaagagccattgccatcgattctgatgcttaaaatggaaactttggtgtcatcttccatacctcacttgtctgtcttttggattcagttctattccatcccatgtcttctctcttacactttttaacatctcttatttaacctcttctgtattcgaggtcctctgttagagcaggtcctcatcatttctctcctgattaccttagtagtttcttcattgattttccttcctccagtatcatcttcgtctagtccacattattgccaaaatgatcttactaagaaatgattaagaacacaagcgcaaagaccagaccatctgggctttctatcccacactgggactacttgctttatgaccttgggtaatttgcttaaccattctttgccacattttcttctataaaatggggataatacagtgcttatctcatagtgaagttgtgagaatttaatgagttaatatacatctgggctgacagaactttgtgcaatgatggaaatgttctatatctgtactgccctctgtgatagccagagccatgtgtagctattgagctcttgcaatatggccagttgagtgaggagctgaattttaaattttatttagttataatttaattgaaatagccacatgtggctagtagctgctataatggacagtacagaatatgtaaagtccttagaaatagtgtttagcacataagtgctccataaatgttaactgttattaccatctttctaaaattaaacttctctgcttaaaatccttcagtaccaaattctgcgatatagtatatatgagttgtaacccattcccgtgcgttgctccaaacttgtcaattgccacttcttcataatgccctctgtgttccactgtaccagttctcaaagtgtggatgtagaggacagcaccagcaatagtatcccccaaaaacttgtttaaaatgcagattcttgagccatatttcaggcctattcaatcagaaactgaatttggggctttgcaacccgtatgttagtaagtcctccaggcgattctgatgcacgcttgagttcgagagccattgtactgcatcagtctccctgcagttcctcagatctatcttgttttcccttgcccctatatttttctcctgtctggaatgattgttatccattttttcttcctcataaattagctcttcaaccttgcagacttagtttagtcaagtttctttctgtttcttcctccttatcacccaccctgctcccaggctgacttcaagacctgtcttaatctccatgctgcatatgtccgtacacacttgcatcatagaccattttacatagtacttttttagcctgtctcctattagtgaatttaggttcttgtttttcgtctttgtatttccatctatctggcagtatctgattgttttgtttatttttaatttttttaattaaaaaatttttaactgttttgtttgggttgtttcatatgtattaagcatcttccaggggccggcacagtgattaggagtgacagagtaggtaaagcagacatcgtctctgtaataaatacacatggtgataagtgctctgatgaagtaaaatagagcactgtggaaacacagaggagggggtggaaaaagtcagggaagtctgttcagaggaagtcacatgtgaagttagtgaagtggggaagcaaatgggtgcggtgggaaagagagtagttcctgaaaagggaacagcatgtacaaaggcctagaagcaaaacattgtatgcacatagtaactgtttaattggatatgaattttaaaaatcacatgtctaacttagctctyggtttcgaagacatcacccttcccagcaaacattgcattttatatgcttctgtatttttaaagcagttttcatacttgatatcacactttgagtagatggttatggtgtgatagggtaacttccaagccagcaggatacatctttttacttactgccttttaaagcagaaaaaaggatttgttttgtctgaaaattattccacagggccaggaacacatcagtggtgacagaggtaaacacattactcttattgagtaagaatagccaaggtttggccaggcacagtggctcacgcctgtaatcccagcactttgggaggccgagacaggcagatcatgaggtcaggagttcgagaccaccctggccaacatggtgaacgtctctactaaaaatacaaaaattagccgagtgtggtggtaggtgcctgtaatcccagctacttggaggctgaggcagaagaatcacttgaacctgggaggcagagtttgcagtgagctgagatgaccaccactgcactccagcctgggcaacagagcaagactccatctcaaaaaaaaaaaaaaaaaaaaaaaaagccarggttttaaataagcattagaccattgagaaagcatatcattaggaaggctgaaggcagccagtgtgccagccacaactgttgtcacttttttagcctcactgtgtattggctctttttgctcttgttgatgccatcccacttcctgttctcattagccctccattgtaagagtaacgtggcattcgttaatgtgctgtgtaagctccaactattaatttgctactgaatatttgcttttgtctttttgagactttatataatttttagtaaaataaaaactcaccttttgctctctttgattgctttgcaaatgggttgtcttcataatttattaactttgaaagaagactgataaaaatacagttttgtttctcataactttagccaatcgggacaaacctagagaagaaggaaaaagggaaataaaatctgttcccctaaaactttatatggatggtaatattgaaatatttcagatattgaagaattttgctttcacatacatatattttttgatataacaattttgtacataggtacaaaagataggcagtccaggtgctatgattgccaagttttacttagtcagaattatatagttaaggtaataaatggaactagagcctaggtctgttcaatcttagtactccttgagccacatcaagctgcctgttgtgcaagactacagttcatgaaaatgacaagcattaaaaaacaagtactcctggctaacacggcaaaaccctgtctctactaaaaatacagaaaattagccaggcatggtggcaggcgcctgtagtcccagctactcgggaggctgaggcaggagaacggcgtgaacccgggaggtgaagcttgcagtgagctgagatcgggccactgcattctagcctgggcgatagagtgagactccgtctcaaaaaaaaaaaaagtacgaccaggcatggtggctcacgcctgtaatcctaggactttgggaggctgaggtgggtggatcacctgaggtcaggagttcaagaccagcctggccaacatgacaaaaccctatctctactaaaaatacaaaaattagccagttgtgatgatgggtgtctgtaatcccagctacttgggaggctgaggcagggagaattgcttgaacccgggaggtggaggttgcggtgagccaagatcacaccactgcacttcagcctgggcgacagagctagactccgtctccaaaaaaaaaaaaaaaaaaaaaaaaaaaaagtgaatgctccttcaatatttatttcatagatctgtgaaaccatttatcaaatcataggtattattcatctttggatccagcttgcagcactttctaacgatgcccatagagtgtttttataattgaaaccatcatgtttgaactagaagggggatgatagaaattaggttgattaaaaaaattattcagctctctttatcctctcaaaatttatagcctctagatgaaaaggagaaaatagggtatcagatgtattctagaaatgcttgatacctcagctgaaaagtaccatttgccacttccttcaagatagtatttgttttgtattacccatataatatttttaaaagttaaaaacacttttctgaataggtaatgtattcatcactgtgtaaaattcaaaaagtacaaaaacgagaattctgtgaaaagtattattctaagtcttattccctagctacttggctcccctctgggaggcagccggtgagctgtatgtttcttttgtaccttttgaaatgattgtatgtgtatacaaatgatcactttatgtatacatttctcctgtccccccccccctytttttttttttgcatttggcagcataccttaacatactcttttgcatcttactttttttttctcaccacttaacaatatatgctcatgcacttcataacaatgttgcagtcaacagtagaccacatatacaaaagttgtcccataagattttaacggagaggcggagcacagtggttaacccctgtaattccagcactttgtgagactgaggcaagcagatcacttgaggtcaggagttcaagtccagcctgaccaacatggtgaaaccctgtctctactaaaaatacaacaacaacaacaaaaaatttgtcaggtgtggtggcaggcttctgtaatcccagctccttgagaagctgaggcacgagtatcactggaacctgggaggcagagtttgcggtgaaccaagatcccgccactgcactccagcctgggtgacagaacaaaactgtgtctcaaaaaaaaaataataataaaataaaataaaattttaatggagagaggtgaaattaaggaggcttaaagatgggtgactagaggaccccaacattcaccttctccacaaaggtggaccaaaacagccagtagataatcacattttgaatgcagcatttaagagagaacactgaaattaaacacggaaaggatgaggaacctctgaggcacaggaagagagggaagtgaacagctggcctggctgggattggcttggagccgggagaaagtccccagtgtggagaacaggtaagagacagatccccagtgatctgtgttcccaccatggactcctgtaatctggcctcaggagagcttcttggccttcatgggccctgatactagaataggaaaatagggagctgcctggagcccccttgtccgagacccaatgagctgcagcagggtgccattttgacagtccagcccctattagaccacatctttctctggcgcccaattgcccttgaatctccatatccgtagtgctctgatgacatgttcctgtgtccatccagagggctgcagcatcacaatgccagctggacccagcagtgcagagcatattaattctccagaaagagtccartggaaaaaaagaaaaatgcctgagaaacagttcaaaataatattaaagaagctcagtgaaatacaagggtacacaatgtaaagaaatcagaaaaataattcatgatctgaatgagaaatttaacagataacataaacaagaaacagaaattgtagaactgaagaattcaactaatgaaataaaagctataattgaggtggtcatggtggctcatgcctgtaatcaatcccagcattttgggagaccaaggcgggaggatcgcttgaacccaggagtttgagatcagcctgggcaacatggtgagacccctgtctcttgaactgtgatcatgccactgcactccagtctgggcaacagagtgagaacctgtttcaaaaaaaaaaaaacaaaaaaaaactacaactgtgagtgcttttaactatagactagatcaagcagaagaaaggacatctgaatttgaagacagatcttttgaaataattgtcatacaaaaaaataagaaagcatatgtgacatatgggagggacaccataatgtgaccaaatatttgagtgttgggtattccagaagaatagaggggcaaaggcatagaattattactgaaataataactgaaaagttttcgaatcttacaaaagatacagacatacagatttagaaaactaaaagatttcaaaatagattcagtccataaggtgttctccatggcacattatagtcaaactgtcacaaagacagagaattctaaaaatagcaggaggaaagcagtgaatcacaatataagggaagccccatcagactaacagcagaaatcttataggccaggagagaatgggatgatatattcaaaatactggaagaatgaaactactggccaagaatactacacctaacaaagctgtctttttagaatgaaagataaataaattctttcccagataagaaaaaaatcaagggaatttatcaacactagatggccctacaagaaatgcttaagggagttctaaatctgaaagtgaaagggcaatatgtaccgccatgaaaacatgcaaatacataaaactcactagaagagcagacatacaaatgaaaaagagaaaggacccaaatattaccacaggaaattaccaaactgcagtgacaaccaatgagagaggaagaaaggaacaaggatacacaaaacaaccagaaggttaacaaaatacaggataagtcttcagctgtcaataataatcttgaatcagattaaattccacacttaaaatatgtagataaactgattttttttaagacccaattatatactgcctacaagaaacttacttcacctatgaagacatatagaccgaaagtgaagggatggaacaagatattttatgcaaatggaaaccaaaagtgattaggagtactatacttctattagataaagtggacattaagtcgaaaactgcaaaaagagataacatgggtcattacatagtgataaagggatcagtacagcaagaggatataacaatggtaaatatatacgcacccaatataggagcacccagatacataaagcaaatgttattasatctaaagggagagaacaactccaatatggtaatagttggggacttcaacacttcacgctcagaattgggcaggtcagctgtgcagaaaatcagcaaaaactgtggatttaaaccacactttacaccaaatggacctgactggtatttacagaacattttatccagcagccagagaatacacattcttctcatcagcacatggatcattctctaggatagaccaaacaagtctcaacaaattttttaaaaccaaaatcatatcatgtattttcttagaccaaaatggaataaaactagatatccagaagaagaggaactttggaaactatataaatacaaggaaattaaacagcatgctcccgaacaatcactgggtcaatgaagatactaagaatgaaataaaaaaaatttcttacaacaaatgggatatagcaaaagcagagttaagagggaagtttacagccaataagtgcctccattaaaaaagtagaaagatatcacataaactacctaatgctgcacctcagggaactagaaaagttaagaacaaactaaatcctcaaattagtagaaagaaagaaataataaaggcaggagcagaaataaaatagaaactgaaaaaatacaaagaatcaacaaaatgaaaagttttttaaaaagacaaaattgataaactgctagcgaggcaaaccaagaaaaaagagagaagacccaaataaattagaaatgaaaaaggagacattacaactgataccacagaagtacaaaggatcgtcagcaactattatgaacaactgtatgctaacaaattggaaaaccagaggaaatggatacattactggacacgtacaacctaccaaaattgaatcaggaagaaacaatacctgaacacccaataatgagtaacacaattgaatcagaaataaaaagtttccaaaaagagaaaagcctaggaccagatggctttcctctcaattctacctgctgaattttaccaaacttaagaagaagaactaacaccagtttttctcaaactattccaaaaaattaaagaggagggaattcttcctaactcactctacaaggccagcattatcccaataccaaatccagataagaatacaacaacaacaacaaaagaaaactacaggccaatagtcctgatgaacatacatgcaaaaatcctcaacaaaatactgatagacaatccaaacaatccagcaacaatcaaaaagataacacaccatgattaattggggtttatcctagggatgcatattcaaatatgttcatgttcaacctatgcaaatcaataaatgtgatacattgcatcaatagagtggacaaatatcttgataatttcaatagatgcagaaaaagcatttgataaaattcaacatcttttcatgataaaacctctcaacaaattaggcataaaaggagcatacttcaacattaataagggccatccatgacaaacccacagctaacgttatactaagtggggaaaagctgaaagccttttctctaagaattggaataaggcaaggttacccactctcacaactcgtattcagcgtagtactggaaatcccaaccggagcattcaggcaagagaaagaaaaaaaaggcatccagattggaaaagaggaagtcagattgtccctctttgcagacaacatgatctcatatgtagaaaaacatgaaggctctacaaaaaaacttttagaactgataacacaaattcaataaagttgcaggatacaaaatcaacatacaaaaatcagtagtgtttccatacaccaataacaaaagaatggaaaaataaagcaatcccacttacaaagctaccaagacaatcacacaaaacctagttataaatttaaccaaggaggtggaagacctctataagggaaactgtaacagtgattaaaaaaaaattggaggacacaaacaaatgggaagacatcccctgttcatggattggaagaattactgttgttgaaatgaccatattacccaaagcaatctacagattaaatgtaatccccataaaaataccatcaacattgttcacagaaatagaaaaaacaatcctaaaatttttacggaaccacaaaagaccctgagtagccaaagcaatcctgatcaaaaagaacaaagctgggggcatcacactacttgacttgaaaatatattacaaagctgtagtaaccaattcagcaaggtattggtataaaaacagacagaccactgggacagaatagagaactcagaaataaatccatgtatttacagccaactgtttcagtaaaggtgccaagagcatacactggtgaaaggacaatctctttaataaatgatgctgggaaagctggatgtccataagcagaagaatgaaactagacccctatttctcactttatgcaaaagtcagctcagaatggattaaagacttaaatgtaaggtctgaaactgtaaaactacttgaagaaaacataagacaagaagctacaagaaaacaagaaagcttaaggacattgatacaggcaaagattttatggttaagacctcgaaagcatggataacaaaaacaaacaatagacaaatgggaatatattaaactaaggagctactgcccaacaaagaaaacaatcagcagaatgaagagacaacctgtagattgggagaaaatatttgcaaactattcatccaacaagggactaatatctagaatgtacaaggaactcaactcaaagacaagaaaaccaaataatcctattaacaagttggcaaaggatctgaatagacatttctcaaaagaatacatacaaatggccaacaggtgtataaaaaaatgcccagccaaaagtgcagtggctcacacctgtaatcccagcactttgggaggctgaggagggcggatcacctgaggtsaggagttcgagaccagcctacccaacatggcgaaaccccgtctctactaaaaatacaaaaaattagccaggcatggtggtgggcacctgtaatcccagctactcggaaggctgaggctggagaatcacttgaacctgggaggtggaggttgcagtgagccgagatcatgccactgcactccagcctgggcaacaagagggaaactccatctcaaaaacaaaacaaaacaaaaaaaaacctcagcatcactaatcatctgggaaatacaaatcaaaactataataagataccattctaccttgttagaatggctgttgtcaaaaagacaaaaaataagtgctggtgaggatagggagaaaagggaactcttatacatcgttgtgagaatgtaaattagtacagccattatggagaacagtatggagatttctcaaaaactgaaagtagaattgccatatgatccagcagttccactattaggtgtttatctaaaggaaggagaatcagcatatcaaagggatacttatacccccatatttattgcaacaccattcacaatagccaagatatggaatcaacctaagtatctatgagttgttaaatggataaagaaaattttataaatgtatatgtatatatacacaccatggaatactactcagctatcaaaaaagaatgaaactctatcatttgcagcaacacggatggaactgaaagccattattttaaatgatataagccagccacagaatgacagctgtcacgttctcacttatatgtgggagtaaaaacagttgactcatggaggtagagaatagaatgatagttaccaaagtctgagatgggcgaggggtggggtggatgaagagaggttaatgggtacaaacatacagttagaaggaataagttctaatttcattgcttagtggggtaactgtagttaacagcaatatattgcatatttcaaaatagttagaagatttcaagtgttaaccaacacaaatgataaatgtttgaggtgatggatatcctaaataccctgatttgatcattacgcattgtatgcaggtatcaaaatatcacgtgtacctcataaagatgtacaattatgaatatattaaaaattattacagtggcgctgaacagtttctacacctagtgatgtcatagacattatagtgtacatagtgtgcactactcagcatgtttgtggtgatattggtgtaaacctgtgctgccagtcttatgagagcttagcacatactattatgtatactacataatacttgattataagcaactacctgttactgctttatgtatttattatagttgttatcattattttagagtgtactccttcttattaaaaagagtttacggtaaaacagtcccagacaggtccctcaggaagtattccaaaagaaggcattgttaccacaggagatgacagctccatatgtggtatcaccccactttccagtggggaaagatggggacagtggaatacagtgatattgatgatcctgaccctgtgtaggcttaggctaatgtttaatgtttgttttttaatgcttaacaaaaagtaaaagaaaatttttttttttttttttggatagagaaaagtttgtagaataaggatataaagtaagtaggctgggcgtggtggctcacacctgtagtygcagcagtttgggaggccaaggcaggtggatcactggagcccaggagtttgcaaccaacttgggcaacatgacaaaaccccgtctttacaaaaatacaaaaattagctggacatggtggcgcgcgcctatagtcccagctacttgggaggctgaggtgggaggatcacttgagcctggaaggttgaggctgcagtgagccaagatcatgccactgcactccagcctgggcaacagagtgtgaccctgtcttaaaaaaaaaaagtaaatatatttgtacagctgtactgtacaatgtgtgttttgagtgaagtgttattacaaaagaatttttaaagtaaaagaaattaaaaagtttataatgtaaaaagttacattgtggtaaggttaacattattgaagatagaaatttttttccaaatttagtgtagcctaggtgttcagtgtttataaagtttgtattagtgtatagtaatgtgctaggcttttgtgttcactcaccactcattcactgactttcttggggcaacttctagtcctgcaagctccatttgtggtaagtgccccatacaggtgtactaatttaaaaaaatcttatatattgtatttttactgttccttttctatgtttagatactcaaaatcttaccattgtgttacaattgccttcaatattcagtatagtaacatgttgtacaggtttgtagctaggagctgtagcctataccatatagcctaggtgtgtagtaagctatacagtctaggtatgtgtaagtacactttatgatgttgcacaatgatgaaattgtctaatgacatatttctcagcatgaatccccatcattaagcgacacatgactgtatcttaaaggatgtttcatatcagtacattaggcttagtaatgtttcattgtatgagtgtatcataatttatacatttttatatgtagccccttgttaatggacatttgtttctaattttttttgtgatgacaaatagtgctgcattaataacctcatttgtatatcatttcacttataagtccctagaagtggaattattgggttaaagagtgttatggcgttataattttgatattcctgtatttttctccatagagagtcatcaccagtatgtgagagtaactgcttccctataccctttgcaacacactgtaaatttttttatttttggcagtctgacaagtgaaaaatcgttacccacttttgactacatgctttcactcacaggggagtttgctcttccagcctaatgaccaaagacaacatctaatttgtatttgtactgttaggctattttaaccctgattttccaaaaaaaatgtacagttcttagaggtaatcaaattttttttttaaactgttactatgttgctttagaaatatctaggtttttttgctgggtctgatttgaaagcagtgacctgataratttctgttaaccttaccacagtgtaactttttacgtacagtattttacaaacctgatacagtatcaggtttgatactgataggtttgtcagtctttttaagtgcccattatgtagtacctgtatttgaaaacctgtataattttgaatacatattatatgctaggtattatatttagatcacagcaactctttaaagaagattgtctgtgttgaaggctcatagaggtcaaacgatttgccgtagtatattagaatgtagatgctggtagagtcattaaaagagaaaaatacacayttggagttgagataaactgaaattgttaaacttgtgcaataattaaaagtattaactgagttttgttttgttttgttttgtttttgagacagagtcttactctgttcaggttagagtgcagtggcacgatctctgctcactgcagcctctgcctcccaggttcaagcgattcttgtacttcaatctgcagagtagctgggactacaggtgtctaattagccagcctaatttttgtatttttagtagagatggggtttctccacgttggccaggctggtcttgaactcctggcttcaaacaatctacctgccttggcctcccaaagtgctgggattacaggtgtgtgccactgtgcctggtctaaagtactccctgagttttttacaacacaaattctcattagtttaggacttgagttaagagtattaagagcagagattccagtctcaccatttacttgttatttgatctttaaattacttaattctccatgagcttcagtttccttttctgtaaaagagggatagtattataatagtacctaaattacaaaattcataaagcaaccttacctttttaaagattgtgtttagcctgatcatgtcattgttgcagtggttttttagcctgtttcaaaaatagagagcaagaaatagtgctgacttccttctcttttctccagtaaaacaagacaaaacaaagtatcagtttgttaactcacaaaatattgccatcacattttaagaccatttgaaattttcatgaacacataaattttaatatgacatagaagtagacagataacataaaaccatttgtcacgttttataatctatttaaattaggatggattttttggatcatattcctttgggaaaggcaaaatatttaaacaatattcctattccccctcagtttggccctatttggaagtaacagtatatctctctttcctcaataaaagaacagtaacaaggacagcaaacttcctcataaaaaacaacaacaacaacaacaagcagagtaccccccccattgttaagttgttaaaataagtctttattttatatcttgaaagctcaagattagggtaaggatcamgttacagagctgttttttccccatgcaaagtggcctggttcatattaggaatgaaactagtgactgtaatgtaattaagcactgtgttgtatagcactgcttctcaagttttcctttggggattttgctaaaatgaagttccagatttttggtgaggtctgagattttgcatttttaaaaagctccccagtattacagtgctgcacaaaacacagttttgagtagcacgtttctgtagcactaacccatcttttactcttgagtaattatcttaaatcatatgcttattttcagacattcattcagcagatttctgctgaacgtctatgtccctgacactatgctaggtactggggttactagggatgctgggtagatagtctgctgtcaggcaagtggggaagccaaagaaataacaacaaagtatatgtaactggtgatgggaaagtccagggagctgataatcttaagcacaaaaattgctttttgacagatttatgaagacagtgaacctagtttatctgataccgtgacatctaggttcccaatagacgtagaatgggggatattcattggatatcagtctagaatggttgttggcaaactctttctgtaaataaaaggcagggtagtaaatattttaggctttgcgggccatacagtctctgctgattactcaagtctgcgaaccaggtaacatgtaaatgattgtgtgttccagaaagactttatttacaaaaccaggtggtagactggatttggcttgcaggctatagttctagattggcagcatatcactcttcacttataagatatgaaaatagtttaaaggaatgatttatttaaaaaaagaaggtaattacattgataacatcactgcatcactgattcatttgcatttgaatatgctatcttggaacattagttgtttatatacctaaggatacccctgagaatatattatacatgtgattgtcatttgtcttgtatatcattggaggaaaaaaaagggttaaggtctattgcttggaactttagttagaactcctaaagagctgcacaaatgcccatttttcccttctattatatgggggaaagaaaccatgatatatagaaggagttatagaatttgagtataggtatgcagtgaagcatatctgtaaattgctttttctggacaatattgaaaactgtgtaatccccagaccagaagaggacatccctggatactcaatcagttaccatcatttagggtaatgaatataatttgggctctggagtttaccttttggtttcatcacttaactcgtgtgaatttggcagagtagttaacctctttgccctcagtttcttcatgggataatgatactgcaacatacttttgaaaattataaaaaacacactatatttgatagcaactagtatagcactagaaaatagtgagccttctatagatgttacttttcttctcttctgacctgcctgcagagcagtttactaatgtactgaaggaaactgaggaaaaaaatgttcctggcacataagaatcttaaaattgagcaatatactaatgtactgaaggaaattgaggaaaaaaatgttcctggcacataagaatcttaaaattttcttggagttgtatataaaaataaagaggaacactttcaaaataacatgcaaaccaatgtaaggcctctcaatagaggtatctcaaacaggtaaaaatatcatttagttgtagaactaaaagtcttaggacttctttaaattcaaacccttatttttacagatgagatcaaatgactttccctaaatgctgatatgttgcctttttgtgtggagaatttattctctaacattcattgattaaccagatgctgttgcctcttggttaggaatttaagttaaattcatccgtttcagtttaagcaccgaacaacttgttctacatggtttttttgtttgtttgtttttgtttttttttaatttgaggcagagtctcgctctgtcgccaggctggagtgcagtggtgcgatcttggctcactgcaacctctgcctccccagttcaggctattctccggcctcagcctcccgagtagctgggattataggggtggccaccacgcccagctaattttgtaattttagtagagatggggtttcaccatgttggccaggcgggtctcgaacttctgacctcaggtgatccatccacctcggcctctcaaagtgttgggattacaggcatgagccacctcgcccagcctgttctatgtgtttttaatacttaggaagtgttgatacatataattttctggccttaacagagatggttagtagctattcataggtctgactgtaaattaaataatttttatttatttatttactcttttgagatagttttgctcttgttgcccaggctggagtgcagtggcacaatctcggcttactgcagcctccacctcctgggttcaagcgattctcctacttcagcctctcaagtagctggaattaacaggcatgtgccaccacacctggctaatttttgtattttagtagagactgggtttgaactcctgaccacaggtgatccgcccacctcagcctcccaaagtgcaaggattacaggtgtgagccaccgtgcctggcctaataatttttatttctttaatattgccactaggaacaattttctgtgacatttttgtagctctgtagttaaactaacttggaatttctttacagagcttagaatttacaatactgttagtctctttgagttgtattagtagaaaggaaaggtgacattaaatactgacaagcaaaaaatataaagtaattgctctttggcagctttagtcatgcctcctatatctgtctcattttgccttggttcatgccctcgtcttttctttcttgggttattgtagttgtctttcagatggtttccctttagtcattcaataaataagtggtgacacatgataggtacttctaagtgcggtgagttcagcagtaaacagatggatcaacctccctgccctcgtggagcttattatttagcagactctagctctgtactttgagagcttccctctctacttttgtctgagtgctatctctaaaatatgtcctcccagtgttcagaatcctcaagtgcaagtggagtgggtttctattgtcttttggacaaggttcgggcttccttgcctttattgcaacttcatctcttgccatgctcttcttaaccctctgccttccagcacactgtagtcccttgttggcaccacactgtcttaacatttttatacatatatttctgtctgcaaattcattcctttagatccccccaccccaacaaacaaaaacaaaaatagcgaatattcatcttttaagcctctttgacttacccactactacctctctgctttggtgccatgactcccttcctttataaacaaatatattctcatggtccattaggcatactgatactatgacgtttttctccctgtattatgatagtctgttcatttatctgcctgtcctactagaattaaaggcaaaggctgcttttttgtttatttttcagtgtctctcaaggggcctggctcatagtggtttgaaatattaattgaacaaatgaatgaatagcccagacttctactatctcaatgctgtcaacctgacaacgtgcgggggattcattcagtaaccctttaaattagtggagtgcttattactatgtgccagtgatagagatacatagataatctgtcctcagatgagtccactgtaaggctgacagcttccttattttcacagcatacwgtcttttaaattttttatatatttattagaaaactaataagtagtctctatcaagtatctaaacaagtgttgagagtatctttttattgaagtagtggcttaaactattgaagagatattgataaaaatttggggaaaataaaagtgtatgtagtgctaatttttttttgcatccctcagagatccagagtcatttggatagtttagtaatatataaaatatattttgaaaaactgtgtttgttaagtttttagtatctttaaaaatgtgaaggctgataaaattttatttttctaattaagaacaaagttttgacctgtaagtgctacccttggagaaaaatttcttctatctccctcctctctttatagtaaagccatctacttgtatatctctgtatcatatatgtcccccttttttaaacagtagatttagttgttctcacattacagttctctttgacccttattttatggatattacagtttgacttttgtatttacaactgttaatctctcaacctgttttatgtttatgtggacatgttaagtgttttgtgtacttcatgatggtttttcaaatatgattatacaaatatccttggatataccaaatataaatatattattttgaaaacaactgttagaatatacattgtgtgcaaatttgttataagggaaaggtttaactaattgaaatgaactttgctattaatttttatattgcctgcatttaatagtaattttaaaacagtaagaagagagttgtgtttctcaaattgcttccttggcacgcagttcctgaatgtgttcagagaacagtggattccaaggcagaataagcatagcaaatggtacatattcatatttcacataaacatagcgaaggaactgtggaattcccacctctacacctgtttaactttgctaacttaacttatttgtgtaagggaggacaacctcccttccctcatctcttgcctcccttaagacctgtttgggaagcactgctgttaacgtgcagtttctggggctctgatgtcctggtaccttgccttttggttatttaatgggagttaagagtctttgcctcatctgcatttgcattaaaatgtctgtgggagttacttcaaggggaaaaatgagctagtctgtttcaattggaaaagtctatgtctagagtgtgtctatatgcatgagcaaactttgctatttttaaatccctgtgtgaacgtcagattttttggctgttttggcttattgcagtaggaatagataaattgatgttcagctcagttgttcatagcattgcatgggacaaaaagatggttactacaaaattatgaaatcaaaatgctttttgaaaacctaaattttcaaatgaaaaatatccttcaacatacatatttagctcaccctttattacctgtttctctgctgaaaggatagaatagtacatatgccaggagttgaaatttatctatacattgaaatttatacgactgtataggaggttgtggtttggcagcaaaagctttctagatcactaatttgtaagcgccttgaaggtaagtgttcagtgtctcttacatctttgtattgcccacaggcaaatgctgttttatgagtggcagtaatttgtattctgaacttaaggcaagaaagactttgtataggatctgcttttaagtgctgtcgtggtatctggaaagttgtttgcatagttacctccttatctgtctgtcctcttggcttcctagttctgctttccccccagctcatccatgttgaagggatctggctatagattgcaactctgcttactgtagcatagggctgccagcttggtagtccggattctttttagcacagaaggggcatgagaccacattggacatattacttgtgagctttgagaagtttttgtggataacattggcagacaacctctgactttgacattatagcctactctgttatattgttctcctctcttctgccttactatctcccttcatgcactggttatcccatttgaaatagtgtttctggaggcttaaagatgaggagtagttgaacagttatggacagtgatttctcagctccttagagaactgaacccataatctatcctttcctagcgtaatcctgaacctgtaactacatttaataactgcatgtaccgaagtatttcaagtaatcctgaacctgtaactacatgtaataactgcatgtaccgaagtatttcattggatcacatactgctccagcttctacttcagtttctacctcccttgtatatgaggtcacttattctagttgagtaatatctctgaatttcttcctttatttattaaaaaagtgctaatatgctgtcctccgagccccatttaatctttttctgttttcttattttccttgcttctctttagccccccgatctgtccttgtcttattgctgtaacctgctgccccttattgatcatacagtggattgaaggtatatttgttgacttaattatctatgtgttttaagaaactggttgcctgaggcatttctgcgtgtgtgttttaaaagagagcatagcctcttgatctcaagccaaaaatgtggttcatttaactggtattttatcttcaattgatttttctgtggagtttggccttggatatatatagtatgggtatagatgattgtgaatggcttataatagctgattacagagtatggcccagaaattcttttgctttgtactgtgtatggaacagtttggtatgaaaattaactgtagcaaaagcatagttaactttaatagcatatctggcatctcttttctcacacatcacgtctagtacagtagcaaatccttttggctctgccccttagaacaggggttagcaaattatggcccccacctctttatagttcatgagctaaaaatgttttttttttaacaattctaaatggttgaaaaatattaaaataatatttcaaacacatgcaaatcatatgtaattcagatttcagtgtccataagtaaagttgtattggagcacagccacacttgttttcgtttctgtgttgtccaaggcttctttcacggtaccgcggcagacttgagtggttttaacagagaccctgtgacctcagaactgaatatatttactgtctggtctttacaaacagtttgccaaaccctgctctgttgtatatccagaatctagcactttttacttccctcttgactaagtcattgttcttgcctcctaattgaactccttgcttctgttcttgtccctttaaatctgcagtcagtggagtgatctttttagaaagtaaaccaccctctgtttagataaaataggttaataaataagtaaatatcaaggacagttttgaatgaaaattatagaaggaccattaatcttggttaggataggagcaaggaaccccatatattgtgtttaaatgctgatgaatacagaagtgaccatacatatgtgtgcatgagcatttgtaattgaaaaaaagcagagccaaggccgggcgtggtggcttacgcctgtaatcccagcactttgggaggccaaggcgggtggatcatgaggtcaagagatggagaccatcctggccaacatggtgaaaccccaactctactaaaaaatacaaaaattagctgggtttggtggcatgcgcggctgagacaggagaatcgcttgaacccgggaggcggaggttgcagtgagccaagatcgcgccactgcactccagcctggcaacagagcgagactccatctaaaaaaaaaaaaaagaaagaaagaaaaatgacagagccacctccctctgtattgctatatttatttatctataaatttacatgcaataatgcattcttttctgtgtctacttttatgagttttgataaatggatagagttatataaccaatcaccacaatcaagatataggaaagatccattatccactaaaaaaaaaaaaaaacttgacttttgtagtcatcaccctcccccaaccctggcaaaccactgagctattattctccctataatattacattttccagactgtcatataaatggaatcaagtatagttttttaagtttggcttatttcatttggcatcatgcatttgggattcatccatgtagttgtcaatagtttgttcctttttgttgctgagtagtactccatggtgtggtaggtacaccatagtttgtttatctcttcccctattgagggacatttggtttcagtttttggcaattatgaataagctttctataaacattcatatataggtttttgtgtgaatatagtacrgtagtttcctgtggctgctgtaaaaaattgcgaaactggatagctttaaaacagcagaaatttattccctcactatcctgagggtcggaagtctgaaattagtatttctggactgaactcaaagtgttggcagggacacattgcccctgcaggcattctgagcttctggtggctcttggcatttcttggcttgtggtcagcagcagcatcactcccatctctgcctcttcacatcatgtcttctcctttgtgtgtgtgtcacctgttcctctgcttctctagggacacttgtcacaacatgtatggcctgcttagataatccaggataacccccccatctcaaaattcttaatttaatcacacttgtgaagacccttttcccaaataaaattatcctttacaggttcgaaggattaggatgagctgtctgtgggggatttcagtctactactctaggttttcatttgacttgggcagatacctaggaggtgtgttgctgggttgtatggtaatggtatgtttaacttttataagaaactgctaagctgttttccatagtggctgtactgttttgcatgcttaccagctatgtatgagtatctcatttattcagactcctcactggtacttgatattgtcattttaaaaagccgttctaatagatagtggtatttcattgtgattttaatttgcatttccctaacgattggttgtgtgaagcatcttttcatgtgttttatgtacatatcttctttggtgaagtgtctcttcaagtagtttgcctatctttttcagggggttggatttcctctttgttattctttttttttttttttcctcttctttttttccccacacctctgttcttcctaaagttagttttgggctccagggaattgggaagatatttgtgcttttataatcctctgtatgcctcaatatttccttgccacaaacttgttctgagtttcttattcttttttttttttctgagatggagtttcactcttgttgcccaggctggagtgcaatggcacaatctcagctcaccacaacctctgcttcctgggttcaagcgattctcctgcctcagcctcctgcgtagctgggattacaggcatgcatcaccacacccagctgatttttctgtgtttttagtagagacggggtttctccatgttggtcaggctagtctcgaactcctgacctcaggtgatccacccacctcagcctcccaaagtgctgggattacaggtgtgagtcaccgcacccggccgaagtagtgatttttaactgtcgatcagcattgtgaatactcatttctagaamaaatggtctcatttactagtctattgaattaaagaaggtaatgtaggaacttgaaagttggggttcttattttcaagattttttataaagttgagtatctagactgcaaaatgtrtcagtggttttagagggaagaattagcttttcattctgagtttctaaaactaggtatattagacttgggttcttttctggcttttgatagactttctcagaaaataaaatataatctaaattaacatgtaaggggcatgttaggtctggggttgcaagtgactgaagcccttgagtaaaaagggcgatttgttagtgcataggaccaaactgtaaggaatgatagggatggaattggtttttggggacaactgatctgggaattagattattgcctggattatctcctcttatctctgctctctctttgaattgattacattgtttcctgtctcagatgagttttctccaaatgattgggatcatggttgctggtgttttaggactcgtatccttctattttagtgaccccagaggaagaaaagggaccttctttgccagtaggcttaggaaaccctggggaagcaaagaagaatctggtgtcaagaatggttgggcacatagtagagcacaaacagtttataatgctggctgggagtgactgctgggttagtgaaggtgtgggccataagatttgttacacaagccagatcacttttgagatgaagggaagtactaggacaacagatgtaaacttgggctgtctcacataccccagtgatggggaggtgataatcagacttgttgcacagtagggcgccctgaggctgagggtttggaatcgtgaagagacttgcctacgtgtgtgtggaagaaagccaggcagagctctgggttttcttgaatctttttgaggcaacccaagatttctgtagatctgccctaattagtaaatgttattgctttatggataaagttgaagtcctagaatctgaacccaatttctrctttctcataggaaactagttctgtgctctgatacaatgtttactcaacaagtacatagagtgtctgatctgcagtcttctggcctattgtcaatagatggtattgacaataccagtcacccaggctggagtgcagtggtgcgatcttggctcactgcaacctctgcctcctgggttcaagcgattctcttgcctcagcctccagagtagctgggactacatgcgtgcgcgaccacaccaagctaatttttgtatttttagtagagacagggtttcacaatgtttgccagactggtcttgaactcctgacctcaagtgatccatctgcctctgccttggcctcccaaagtgctgcgattacaggtgtgagctactgcgactatcctgttttatttatttatttatttttttctgttgggtaaatctgtactttttctttaatgagacctgtgctttttacaaaggattgtggttttktttttttttggtttttttttttttttttttgagacagggctttgtcctgtcgccaggctgtaggtgctgtgatcatggctcactgtagcctctgttttctgggctcaagtaatcctttcacctcagccttttatgtagctgggaccacaggtgcatgtcaccatgcccagctaatacttaaaattttttgtagagacaaggtcttcatatgtttcccaggctggtcttgaactcctgggctcaagcaaccctcccacctcagcctccccaaatgctgagattacaggcatgagccactgcacctggcctgacaaaggatgttaatgtttaatatgttgtggaaaaacagaaaaaaaattaaaggttttgtgaagaatgtaaaatgcacccacatgcacccattagtcgtctcagggtcacatgtcaccttttccatgaagatacttgttatggtcttttatgtagggtgtttttttctttttaaacttacatactagattatctgcacctagcacagtggtgctgtatatggttgttcagcaagaatccagttcctgtgaagtttcctaagataacagcataagataatatttaaaatttttattttcatataaactaatagcattaccttttaatattttacttcagattactttatggttcctgttcttttattcaagttctgcagatctagttactgttatccccattttatggtcaaggaaagagacacattgtagttaactaactgattttctctctgatgtagctagttatttatatgcaatgttctcactaatgtattttccgcaacgaattaaactaaaacttgagagcgtgatattaaaaggtgaatgatgatatgtgatttgagacacttggtatgaaagccagccttgtacaggggtgctgtgtatgcagagtcatttactgtagagtttacattaaaaattgattttcaaggtaaaaaattgctctcttcatcttttatattgctttattcaccaacttttaaattacaattttaaaatgtcttctatatatagactttctagaactaaaccagtacagttgccattaggtgcatgtagctatttaaatttaaattaattaaagttaaagtaatgataaccactagcacatttcaagtacccactagctcacatgtggctagtggttacagtattggacaacagagatatagaacatttcatcatcccagaaagttctactagatggcactgttcttgagaacagtgttaaaaaaatgtcactcgaggggccaggcgcagtgtctcatgcctgtaatcccagcactttggaaggccaaggcagaggcaggcggatcacttgaggtcaggagttcgagaccagcctgggcaacgtgaaaccccgtctctactcaaaaaatatataaaacttagctgggtgtggtggtgcacgcctgtaatcccagctacttgggaggatgaggcaggagaatcgcttgaacccaggaggcagaggttgcagtgagccaagattgtgccactgcactccagcctgggcgacagagtgagaccctgtctcagaaaaagaaaatattacttaaggatagggtttcagtttttaggctctaggatttttggagttgaaaatgttagctttggattatcctaatgaggggagctttgtgagttactgtctgtggatcaagcctgtcatgttcacactctgcctaatcttttactagtctctctggctctgtatatatcagccatacttggctgagggttttttttggggggttaagtagtacagaatttgcaaatgtttgttttatgtagttaaagccttgatgcttagtatcttttccttatcaataaaatgaagtaatgagatactgactatatggaatttgaattaattgattgggattatgaagttaacaataaaaatttttttttttttttttttttttttttgagacggagtctcgctctgtcgcccaggctggagtacagtggcacgatctcagctcactgcaagctccgcctccctggttcacgccattctcctgcctcagcctcctgagtagctgggactacaggcgcccgccatcacacccggctaattttttgtatttttagtagagacggggtttcaccatgttagtcagggtgttctcaatctcctgacctcgtgatccacccgctttggcctcccaaagccctgggattacaggcttgagccactgcgcccggccaacaataaaaattttaatgaactttctagtcctagtcccaggagaaacctttgctgtgttttaaagttaactcaacttcatctctcattctctagactcctcagcccttaaaagctcagtttagtgccttatagaactcagtccacacatttcttaagtaactgctctggaccagtcactgtcttacataatttactaattcatttatgattatctttaactagataatgaggtccttgaaagtaagaaaccctgttttatactataattttagaaattaagaactgaaagagactttagagctagtcatgtcaaatattttcattttacaaatgaagaacccaggcaggttaagtcagttccccatatttggagaattaggattaaagaactagcctttcatcagactatctactttattggttgattgttaaattaatctgaaggaagttctcagcactactctatgttgaggattctatattgtctatataaactgtgtcattgtagaataataaagttatttataactcctgatttcagcacacggtatttcctatttgtttcttatgacgtgttcttaggggcaaattgcatgatagttttggagatacagtattatgaaaaaggcatttttggttttagattagagtaagttgactgatttttttttttttttttttttgagatggagtcttgctctgtcatccaggctggagtgcagtggcatgatcttgactcactgcaacctctgcctcccgggttcaagtgattcttgtgcctcagcctcccaagtagctgggattacaggtgtgcatcaccatgcccagctaatttttgtatttttagtagaaacagggtttcaccacgttggccagtctggtctcgaactcctgacctcaggtgatccgcccacctcggcctcctaaagtgctgggattacaggcatgacactgtgcccagtcaactgatttcttaggttaaataaatactcctggtttatatcttcatttattatacttgctagtacaggttgagcatcccaaatccaaaaagttccaaagtctgaaactctttgggcgtccacatgactctcaaaggaaatgctcattggagcatttttgattttgaatttttggatttgggatgctcaaccagtgagtataatgcaaatattccaaaatccaaaaaacatctgaaatctgaaacacttcttgtcccaagcatttcagagataagggatacccaacctgaggtgacgtaacgtaagatgttacggagttggagtgtccatttatagaagcaaataggcctgactgtttctatgagctatagagttttgatctctagttttacattccaggtacagttttggttttgatattactattgtgtacacacatgtgcacctgcacacacacacataacatactcccagacacctacttacaagagtgctaagaacaggaaactgtcctaggtgcagacaaggctagactcttctagggtccctaaactgtttcttaaaattcgtttttattcctcctagtccttggcaaagtggtgggtgtatattaggtattaataaggtaattgttatttgatggtatacttttgcttcacagaaactttgtttatttctgtggtagcatatgcttgtagttgtcagggaccagatcagctcaggcttttttgcagaatacaggttatttccccatagggttagtatccccaccttcttcccccaagaactgaaatcattttcagaagggagtcattgcttctggatcaagactttaattatgggctttttttcaaaggcagttcccttttctgcagttgttctttggatggatggatggatggggagaaagagagtgagtgwgtgtgtgtgtgtgtgtgtgtgtgtgtgtgtgtatttgcttgcagcatttgaatatgtgcagcacattggctttctagacatcctttgtatagtaacagcatgtgtggaagggctggcagcctgtaaaacagtttttctcctcttccccctccttccaacctcactccctctctggatctggtgacattacatagataaatgtgctggctaggaaaacagcagaaggagttgaatgtctgccaaaaatttgcagcatgaaaccaagctggctgcttcagcctcgctttcctgatctcttattgtgtgtgtgcagtctgcatttgtcagggttttccttattgagcattacgtcactatgttctccacccttatcacactggcttttcttttgaaagctactgtcctcaggcttcaaactcgttaaacacttaaggctttatttatactgttacggaggtagtattgaagatgaaatatatttaagtcagaaattttaatttgatgcaatattaacttagagtatgcttttgtgtgtttctgggcaacattagggtagtgtagaaaagaatatcttctgaaaggactttgaagacagaaaagtactgattttttttaaacacgaatatttataatggctttataagaatcaaaatctggaaacaattcaaatgttcctcaaatggggaatggactgtggcctagtcatacaatggattgttactggcgatgagaagtaacaaactatgacacagccattaacatgaatgaatttcagatgtaatctgctaagcaaaagaagctagacttacaaggctactgactgtatgattccatttatatgcagaaatagtgccttttttttttttagagacggagtttcactcttgtcgcccaggctggagtgcaatggcgtgatctcggctcattgcaacctctgcctcccaggttcaagtgattctcctgccttagcctcttgagtagctgtgactacaggcgcacaccaccacacccggctaatatttttgtatttttattagagatagggtttcaccatgttggccaggctgctctcaaactcctgacctcaggtgatctgttcgcctcagcctcccaaagtgctgggattacaggtgtgagtcaccgcacccggccgaagtagtgatttttaactgtcgatcagcattgtgaatagtcatttctagaaaaaatgatctcatttactagtctattgaattaaagaaggtaatgtaggatcttgaaagttggggttcttattttcaagattttttataaagttgagtatctagactgcaaaatgtgtcagtggttttagagggaagaattagcttttcattctttgcagagtctggtgagagtgcttgaatccatgtctaaaaaaagggctttgcttactaaagctttatgtagttacttaaaaaataagtgtgctcctacttctttttttcctgaatccttcaggcttatacagtttaggaaccattaatttgaatcagttatttgggcaacttacctgtaatattttcattatgtttgttacttagcatatgctatcctgtattgtaatgttaatgcacacgtcttaattttacaactagatcataagacccagcagcagggagctagttttattatatatttgtttctctagcacctaactaaatatccttatacacaataaatactaaagataatggtctgtgtaggtaacattgaggatatgaatagtatgaggtgatttcactagctgactactagtatgctagggctgttattacagaataccgtagactaaatggcttaagcaacagaaatttgttttcttacaattctggaaactggaagttgcaaatcaaggcaccggcaaggttatcctctctccttgtcttgcagatggtcacctttttgctgtgtccacacgagcttttctctgcgagtacactcctgatttctctttctcttataaggataccagtcctattggattagggccccagctttatgatctatttaacctcaattacctctgttaaaggccttctctccaaatagagtcacattgaggaattagggcttcaccatatgaatttttcagggagcaaaatttagcctgtaacaatgacctcctgaagataggtaggtatgccaagttgctaagatattaaatagaatccacactagatacttcagtaaagaaaatgatgtatagggaattgataaagcagatgctggagaactgaaatgcaaaatggaaaattgaagtaacaccaaggtaataacttcctgaatcagctacaaccccatgggctggggaaacaaaaaaaaaaaaaaagaggtttgaattattggaagcttggaggaggggctccacagagctgagattcagacttaggaggaaggcccgctgcctgattgctttcaaagacttgagcgagaggccccacaaagttgggtctcagatctctcaaaaakatgtcttgccctgctgctgttgggctttctgagggcgcatgggaagtctagttctgagagctgaaggaagctgaagactggaaacaaccgtttctcctcggaaagggccaatgctagggttccagtggcaggataggagatagcaaggagcaagtccgttcttttgtcacctttacgttctagtcttcctctagtgtgttcccggctggtggagatgaatgggaagccgcctgacaggagaaatgaagtgtgcagaatctgagccccacatcataaggcccggtagagaagagtgaacttggacttgagacacagcagcttaatagatggtactattattggcaggagtacagcctccctgaaattcactttggcagtatggatcaaaaatcttagaaatgtgcataccttttggcccagtaattccagttcaaggaatatgtcctaaggaaataatccaaaaagtagtaaagatgtaagtacaaagctgtttgactgcaatattgcatataataaaaaattagaatttaaatgttcatcaatatgggattggtcaaattaccttatagcatttagtgaagtgttatatagccttaagaaagatgatattgatttggatttgttgatgtggaaatagaaatttaacaaaaaaacagattatactccatcctgctgtggactcgtctgtgtttatgtgtgggttttttgttttgttttgtttcgttctgtttttgttgtttgtttttgagcagagtctcactctgtcacccaggctggagtgcagtgatgctgtcttggctcactgcaacctccaccccccaggttcaagtgatactcgtgcttcagcctcccgagtagctgggattacaggcacacaccaccatgcttggctaatttttgtatttttagaagagatggggttttgccgtgtttgccaggctgattgttttgttttgttttgttttaaatctatgtaaagaaaaagctgaaaacaatatacaggaaaagagacagtacatcaggttgaagaatgcaggctctggagccagactgcctgggtttgtatctgggctgtgccacttacatctttatgacttgggtaacccaaattaatctttctggggatgtttcctatctggaaagtggtgatgatattaccttccccataggacagttgtgaggtctgaaggtgttaatacctgtagagcatatagaacagtgcttgtgattaagttctcagtagatgctggctattaagaggaggaagcaaaagattaggagagaattttagtcttatctctcgttttattataaaaattttagtatgaatgttacgattttataattggggtaaatagtgaagcttttccattaaaactaaaaacaatgaagcagacaaagacgtactaagtatctttgcatacatgtaggagacctagaactctaagatgctctctttataggtaaccaagcatttcctgctgcagcctagatatagctgacaactgaggcttgtcttttgacaagcccctattccttgttgtaggagaatttcattcttctcaagatctgtacagatcctcaggaacttgcattgttaagcttacttctggctaggttcccaaggccttcatcttacttttgccctagctctttgggtgtgtctcttccctctgctctgcactgcacagaatcaaacttaagccccatgccttttaaaaaattactgaaaaatgacatacttgtttttttagtgggctgcaagtttcaagatttttattgtagcatagaaaaattttagaatgtagtcttagacagttttttgaaaagtcccttgaccatgttgcctttaggaacttgtcactagctgccacttactctacatttcaacctccttccacctttcttgaccctctcaatgccttgtcttagtttcttaggcagaaaagtttttgtcttacttagttacagagacastaatgtgctgtgttaaaataaaaggtcttattagttacatttaggaacctgctttggttccatatttttgtctatcttttcccctttcttaataattctctgggagtggaaaaagggagtaaagattgatttctttttgctatgaataatgctgttctttgaggaaggcagcagagaacctctggtcagtatttgttttaaatatccaagtttaaaccattctacactatattatgttagtatcactatttaccaataatagaaaccgagcattttctacctgtaaagcctccttcctcctccttccttccctccttcctctccctccctcacgttttatctatagattgttcacttgagcaactgagttgaaaactgcataatgtatttagagttatgaacttggagtcagaatatctacctgactttgaatgtcacttttgtcactttactagtcatgtgcaccgtttgacagtgattttttttctttgtttaactgaggagcgtataatgatttttgcagatccctttcagttccaaacatcatgattctgatagcagaaccttgcattctatcagatatgtatcagttattgttcttcataggtcttgaagaaaatgatgctatatgccgatttgttcacgtgttcttaaacctttggccgaaataaatgcctacaataacaatattttaaaaatttaatgaacatgaaagtcttgttgaacatcttcttctaaaacatcacttttttttcttttttttttcttctgtttttttgagatggagtcttgctctgttgcccaggctggagtgcaatggtgtgatctcggctcactgcaacctctgcttcctgggttcaagtgattctcctgcctcagcctctagagtagctgggattacaggcgcttgccaccacaccccgctaatttttgtatttttggtagagacgaggcttcaccaggttggccaggcaggtctcaaagtcctgacctcagatgatgcacccgcatcagcctcccaaagtgctgggattacaggcgtgagccaccgggcctggcaaccatcacttctgtatatattttagcatagaaatattcttttgctaatgctcttatactcaagtaccactaaattatttttttaagtgggtaatatgcagtgtggcaaatgtgtatgtacaaagactttaaaactcttaatgcagttgcataagtaaataccatatatagaaaatttcttaggccacaggaaattttaatgaacytgcctatttcaggaagttaaaatagaactaaaacttgccctgagttaagaagtggcaatcagtcagttaacaaaaataagctttgaaggatagatacagttttgaaaaaggtgtagcagaaactagcacttactaggtgtttcttacatttgaattacacagccataactttatctgttaatcttcacattaacttgaaaggcaggtatgttgtacttttcaacacttaagtaacttgcttaaagtgatgccacagtggcagaacccagtttgtttctaagtgctgctgaggtgattcttgtaggtggagatacaaacgactttgagagaaggggtaaaataccctggagaatgagcgtaaagtatgatttctgaagatgaatgagtagattgggaatagaggaagatagagtgagaaaggtagtttagtatataaaggagggaattgaatgccagcctgtgggagttgacagttgagatatattttataagttttgagccaggcaaatgactggataaaaatagtatttaaggaggattaatctggtagcaatatgcagaaaaaagtcaaagaaagagtagagggagtcagtctatggaggagattgcatatggtgacatgactgagtcaggagagaggtacaaacatgtaaaagaaactaaagtagaaagaaaaggaccacaaaggaagggagaggcaataataatttgtaaatatcatccagtatttggatgaatgaggaaatgtatcactgacaaatagaaagtggagctttcaaataaccactaaacctgtgaaaggaagataacgctttgcagtttcttaacttagaatttaaattcagcaaatatggatattgtcatttttgatgtcacttctgattaagaaatagaagattgttagagtatcttaatagatgattgatttcttatctgaatttccaataatctacatacatagtaaaagtggaaattgaagtttatcattactgatccaattatatcattaactttcaccagtaatcttattgatgtctaattgtagaagtcattgaatgaactcatcataataaaaatgaattcaatttagcatccctattaaagttttgtaatggctaatgggttatgttggaattgattaaaattatagaaagttatatactataagtaatggaaattataggtcttttcccaggccattcattttttttttaattattataaatcttttgcaggtgtgtacttttgagaacagcttatccttaaaaatgtttaataagcagccatagagtacttgatagtatatgggatgctgaagaatttaaagagattaaagtccacccagatatagtttccttgaagatatagaatctaggaggaaaggctctgagtaagtaatgataaatggagctaagcatggtttcattgcattttaatttcaacaaacgcttacttagtatatactaagtgcaaggcataggtgaattaagtggtgatatctgctcacctaggatatcagtttggaaaaggtggctaaaaatggaattcaaaactgtcagaaaggatttggtcagagcatgagttcatcaaaggctattattagtgaaagaatgaaaaacttggtaaaattgacatgaagagcttgcctgagtggaagagaaccatacgttttagaacattcagctttctcaaagtatgaacactttccaacaaaggatgagtttcctaaagggaatatgtgtgcagtttgttactcttatgatattggaaataacgaattttgcagagattcttccagaaggcttacttttttggtgtgtgagtgaaaatatgaatggtacttaattggtttctaattgttttgtgtggattttgtctttgaattgactgacatttataagtgctttgaaaatgtgagtacaaccttttctttgattgattcaaatttttatgttatgttaaaatgcccaccaaggagtaacatttactagacttcttactgtgtattgggttatattttgacaacctagcaatactcgttttcctcatgcccagtcattgagcatcattttggtttccttcactataccatgcctgaaaatagtccaattttccacccttctaagcttaagacttaactcctcttaatccttcaggtatttgtatagtagagtgcttgtcagtagatgtttatcagcttatagataatgtctctgctgaaaattatttgtttcaagttctgtgaaacaaatacccaccgaagaaagttaatttcaagttaaatttactttacttgattatagaagaagggagtaggatgaagtacctgggagccactagaggactggagaggcagtctaggttgtagttgtagagggatagatttgagagaagcttatggtggtttatgctcagagtaacctggatggataagatatatggtggtcagaaagaattttttgtttgagactgaaaagtgtttgatctatagatttaattcttaaaaatttttcttaagacaaagtgagttgtttttatgcaattggattaaaagataactaacttccatgtaggtacagtgaaaataaaatggctaacatttaaattcagtagccaaatataattgttattagtaacttttttttccatttttgatgggctacaattatatttctaattctgtttactgcataccagatttaacatattcctagggttccacaggaatggttaaaaatacaggtttcaagatgagaacaaattatagtagttgcttttcattgcatgggttttgacctattacttaaatcatctgatttgtgagaatatgaaaaatctatactaattggttttgttcatttttatattgtaaaatttatataaaaatttaccattttaactatttaagtgtataattcagtggcattaagtacattcacactgtcgtgataccatcaatttcttttccatccattcagaacgtttccatcatctcaaacagactctgtatccattaaacaataacttcccattctccacttcccatggcctttggtaacctgttttattttctgtctctatgaatttgtctattctaggtacctcatataaatggaatcatataatatataatatatgtccttttgtggtacactactagattttaaagaaacgagttgcaataattatagttgaacataagttttgtgtatgccttagtctgttttctgctgttgtaacagaatgctacacactgggtaatttataaagaaaatatgtttatttggttcatagttttggagactgagaagtctaagatcaaggggcctcatctctctgtgagggccttcttgcagtgctataacatggcataagggcagaagacagaagcgagcacgcaagacagagaggaaaagggggccaaattccaacgataactagcccactcccctgataacagcattaatctagtcatgagggcggagccctcatggcccaattaccttccgaaagcccccacctcttaacaacaccagacttggaggggacattgaaaccatagatactttatagatgttttgtatttaaatctatggtaggatgtgctcattatccttttttgttgcttagtgcatgtttgagtgttatagggagtattacatgaattatatgtgtacttcttccatactcttttaattggatatgccagtgtgtctcagtaatttccagtggctgtaaaacttgagaaattttgtagcttttagaaaccacatacctgtattgcctgattgcttattaagtgatctcttagaggtttccaaagttatgagtttgagtttacaagtgcagtttttttccatgaaaatttcagtggtgacaaattatagaatttatcattcaattcagtcttaactagaaataattgcatataataaaacaggttcttgactgttctttttgtcagtgtttaagaatagagacaaaataaagttagatttgagtgcctcagaagatattagaaaatagagataaggtttatggcctttaaaaaattaaagacagtattgggggaaagaaatgaaaattgggaccgggcgtggtggctcactcctgtaatcccagcagtctgggaggccaaggtgggtgaatcacctgtggttaagagttcgagaccagcctgaccaacctagtgaaacccccgtctcaactaaagatacaaaattagctgggtgtggtggcacatgcctgtaatcccagctactcgagaggctgaggcaagagaatcacttgaaccaggagatggaggttgcagtgagctgagatcacctcattgcactcccgcctgggcaacaagagcaaaactccatctcaaaaaaaaaaaaaaaaaagaaatgaaaattggactttttagatgggaatatctcagatgatatatctgtgtatctagaaaatgtcattatttaagatattctaaatggttatgattaaaaattatttcatggtataaacttcaacagagagcattgggcaaaatttttactgttcctgtttttaaaagttcaagtcagaatgcctgcttgttaccgaatcatccaccctgtgtttgcctcaatactgccatctggtgattattatagagatctcaacagggtgcttaaaggagatgtagggcaaccgacgacacaaggtacacaatattggtgccctctgcctcaaatctccctctgcttttgagttgctatggcagaaatcttacttagttatggccatgaaatcactttgtgagattgctttgtaaacaatagagcatttctgtactgctgtgattattactgcactacacatggctttttatcaggctcatacccaactcattgttctttctatgtaaggtactcttattatatctagttctacaaggtaattcaattaattattcagtaatacttattgagtgacttctatatactaggcattgttttatttttatttttatttttattttttttttgagatggagtctcgctcttgttgcccaggctggagtgcagtagcacgttcttggctcactgcaacctctgcctcctgggtccaagcgattctcctgcgtcagccttttgagtagctgggattacaggtgcctgccaccatgcctggctaatttttgtatttttaatagagacggggtttcaccacgttggccaggctgctcttgaactcctgacctcgtgatccacctgcctcagcctcccaaagtgctgggattacaggtgtgagccaccgtgcccagcctaggcattgcttttagtagtaagaatatggtcctaaaaaacaggtgaaaatcagagtcttcatagaagttacatttagttaagaataaataataagatatacatacacacatgttaattagtgaaaagggttaaggggaaaaaacaaagcagggaaggaacttgtgaattattggggttggtgggttgctttgaaatgctagatggggtgttcaaaaaaagccttactgagaaggtgacttcctgagtagagatctgaaagatcttgggacgaacattctagatatagaaggaaagcaaatgcaaaggccctgtgcctgtaaccactgccttgaaaacctaagcaaggaagctggagtggagtgtagagggagagagcaatagaagatgaggtcaggcaggtaactgagggggaaagcaggggagtacagatcacacagtaccttgtagttcatgtggcatttaatctgagatggaagcaattggactggagagttgggggcagctgaatgacatgctttgatttaccttttaacagattcactgtggctgctgtgtttaatggtgtgtaaagtcatttgctacaaccktttttcttttattagttgtaggaacaggtttactttatatagatcatgggaacaataaggtataagaaagaagcttggataggtctgagagaaatatatggcatattttctgtctctgcacagatttttkcactgattatcagtagtttttgtctttgtgatacagagcaattgaaatcagcttgtagagtttttcttggaaaatgctttgaatatctcttctatttttcctataaccaccttagtgcatttcagattcaaatcttatggtgaacccaatatagttttagccctacctcactggttttcatgctcattaatagtttgggaatgagagtgacctggagttataatttttaaatgcttttaacaatatagtttggcatattgtaaaacaaatcatggtgtactgattagcagtgctatttgaccaataaattaaagaaaactgatagactgtgtcttaacctagatgatttatttaaaccatttgttgctgtagctcatcagctgaaatgacttaaacccccaaggtactgttactctttcccaaattgcacttaaaaaacaaactgaaattatcacttagttaaaatgtcatgatcattgtcagtaatagtatatctctgtggattcactttggtttggtagctgaaaagtttattatttttatgcttggccaaagaatatgcatcttcagtggggagcatgccatgtgtgactgaaaactgtttttatacagcttgactctgtttggaataacgcctttatttggcttaacaaattgcttttcagctttattttcacactgtaaatatcaatattgtataaacttgtcattattgggactaatcagcaaattgttttgtgtcatgagtaagcacggtctaagactgggattatttgataagtgctagaataatttggttaaactgtctatccagctctaagtaacaacacagccagttggtctgaatcactgtgcctcaacccttcactttgatgaataggtttgaatggctgaagctaatttggtttggggtagacaaagtctagtaatgtgaaactgatcatatataaaagaagtgttaacagtagtaatattacagggaatatacagggacatagagggacaattttgctagcggtttcttagttatgattttgaataccattttttttgcagttagaaactttactgtcttgttctggatgataaagacacatgtttgaagacaggtttcctatgctgaagaataacaataatttgttttccagactttctcctttttttcccttttatgtttgcttcgttaagtagtaataaagtgatctaatctgtccctgagaagtatagtagattggccaagtactttgctatacttaaatatgttaattttggtaatttagtttgagttgcgatactgttctcagtcttccctctagcttccctgtcctaaagtaggcttctcttcagtgattsctctaaacccaactttgttcctttttttaatccagactgctaaagtgatacaatgagctttatatgtgaacctggtactgtgacctgccattcataggtcattacattgaattgtgtacatatccctcgaggagaatgacttttccatgctctcacccctgttttataaaagatggtgtagtggagagaggcccaggaagaagagttgacacatcatttgatcttcactgcctctaataggtccaatctcttttattacatttgtcttctcttctacatttaaataggtttagtctttcccatcttgaacmcttagaatacattaaaacctattgcaatttctttttagctaccttttgtctgctctctgtccgttcatggcagtttgttggtcctgtgactttagttcttattctgtcactgacaagggctctctcacagtgatgccttcaactatttctcagttgcagaatctagtaaatacctttttttttcttttttttttaaagacagtctcgctctgttgctaggctggggtgcagtggcatgatcatggctcaccgcagccttgacttcctgggctcaagcgatcctcccacctcaccctctcaagtagctgggactacaggtgctcaccaccgtacccggataatttttgtattttttgtagagatggggttttgcttgttgcccaggctccagtagatactttatctttccaaaattgattattgattactttctacttgttgaagttcttgtgtcattacttcttttgtttctgttttctcttagattggtcctttgtggtctccttttttttctcaggtgctcctgaatgttggtatgcttctctcagtctttatcccatttctgtactcccctctccttactttctacccttttctgccccctccacgttctgagtgctgtcagttatcacctgtatgttgatatcttttcagtccatcttcagcctgtttcctaagttccaaactttaatgtccaaatcactattgatgtttcttgaagaatattccaaaggtaccatggtcctatactatattttttgattaatttaaatttaactctaattaaaatatacatacagaaaatgcacagattataagtgtacaccttaactacacataattaacatccatgaaaccaccatccaggtcctgaaagagaacattaccagcacctcagtagtctgtttacaattcactactgtttccttcctttccaaaggtgaccactttcctgacataacaatgtagaactatatttgaacattacattaaaaaaatgtacaggatgtattcttttttctgttctttcaatatagtttgtgatattcatccatgttgttggcagcatttgtttatttttattactgtttaacattctactgtatgaatacagcacagtttatctgtttaaccacctaattatttgggtaaattttgtttgaataaaatgtattattatgaataatgctgctctgaacattttggtgtatgttttattaatatgtacttcaattgtgtatatagctaggagtggaagtgctggatcatgtggtatggacatgttcaattttagtagataacgtcaacattttcaaattggtcttgtcaatttatatttatattcctgtcagcagtgcatgtgttgttccacctttttttttttttttttttttgagacggagtctcgccctgtcacccaggctggagtgcaatggcacaatcttggctcactgcaacctctgcctcccaggttcaaatgattcttctgcctcagcctcctgactagctgggattacagatgcccgccaccatgcccagctaattttttgtgtgtttttagtagagacggggttttaccatgttggccaggctggtcttgaactcctgaccttgtgatccgcccgccttggcctgccaaagtgctgggattacaggtgtgagccactgcacttggctgttgttccactttttaatcaacccttaatatcagtggtcttcataattttagccattctcgaaagtctattttcttgrtgactaatgaggttgaacatctttccttatgtttgttggcctttcatgtgttattcatgtattttctgtgggaaagtacctgtggaagtctttgccatctctgttgaactgtccgcctcttccttactgcaatgtaaaaagttctttatgctggatatgggccatttgttggttaaatttgttgttaatgtcttacattctgtggcttgccttttcattttcttagtgctgtcttcccagtctcttgtcttccttactatgcttctctccccaaagcaattagccatcaagtcctgacaattttatcttttaatatcttttatcttcttttctccatttctttgctcagcgccttaatacagtccttctttgctcatggcctggattatagatcacatcccttgcaatcagtttttaactgcttacagaatgacttttctaaaatttaaatcttggccgtactattcctctgcctaaaatctcccagttgtaccttagaggctacagaataaagctcaaatctcatgactggcttctaccttcttcctaggccttctttagagttgttgggtttttttttttccccagatttttactgctggataaagtctttcctgacttacttccccagttcttttttcatactcctttttgaggaaaggatgtggtagtcttaattatgattaagccataattattaagacaactagccgttcatctctcagtctcttggctgagcactactgttagcttatttgtgttggatgttttgatattggtgttccacccaactctctcattaatctgtttgcttttctggcttattctctgccagccacttaattattggtattctcaccttagctctcttcttcatacctttctccgtgagaaaactcatcaattctgatggctttaatgccattttgtatgtatatgacttctagatttttaaatccagaccagtctctgtcttaaatttcagatctctctgtattatattgtcagtgggtattgctacatgaatgttacataagtattttttattttttattttagttatgttatgttacgtcacgtcacgtcacgtcacgtcacgtcacgttacgttatgttatttttccgagatggactcttgctcttgtcacccaggctggagtgcaatggtgcgatctcggctcactacaacctctacctcccgggttcaagcgattcttctgcttcagtctcccgagtagctgggattacagatgcatgtcaccacgcctggctaatttttgtatttttaatagagacagggtttcaccatgtwggccatgctggtctcaaactcctgacctcaggtgatccgcccgcctcggcctcccaaagtgctgggattacaagcgtgagccactgtgcccggctacataagcatttttaagctcagtaagccccaaactaagctcaccttcccttcccaaayctgattgtgtattttctacctttttgaacacctttttgaacctggtggggctgcctgttaaatacttctggaaaaacttaagtcaaagggtacttttgtgaaagtacctccttccccactttcctcctgttttctattactatagttctatcatggtacctacaaacattttattgtactttatctgttctccccagtagactaaaagcatctcgatactttgtccttggggaagcaagcaaatcaatgaaccaatgaatgaatgcatcttgagggttttccattgccatcctgcacagtgcctagcataaacagttgagaggtgactgagggtacctccaactaaacacatttaaaatggaactcaccagtttcctccaaattgctttcctccaaactttctgctttaaaatgacttgctgtgcacagttgatagcgtcaccatcttttcagttcacttagtcatatttaactcactttgtttttctgctactctcaaaactggttttaagcccattgctatttcttctatttcatttccttagctttggttcaagttctcatcttgtcttcaccagatcattgtaaccactgtttaaatgttttacctatctttggagttttccccgtttgtctttgatattgctacaataattatttttctccaagtgattatctcctggttctgtaaacttgcctataggataaagtccaattttaaaaaaatttattttcgttttaaagctgtatttaggtataattgatatataaaaagcaaatatttaatgtatacattttaatgagtttgagagtccaacttctttaccttcggtggcagtcttcacgaacttatctagcttctttcttttattttttttcccctcccttatagcagaagctatgtgctttaagcattggccttaccagactgcacacctaagtctatgctacttatactacctctattgccttctctccatcactcttaggaggaacatagattaaacaaaccactcttaacatttgttagctactgtccttggacaagtttctaaagatcccaaaacataatactgatgcttagtacatgttgttttcccctttcaacctttcccttcctccacaccacagttggaatttctttttcktactgctagaaaacacttactgtttctctcacttaatgtcttctgccgaggagtcactgtgtctgtttacttgtatatatcttactgctcttgtactagatcacatgctttttcagcgcttacactgtgtcttcttgaacttattccagttgaatttttcaatcttaagggtttgctttttaaaatccacactgtatcatttaggttctaagtgatgaacatgactgggataggattttttggagtaaagtttctaaatggtcataacaaggaccagttgtaaaggcccagccagagcaggctttgtaaaaactcacctacttagctggaatttaggagagtaatacaattgtcctaaacttactctggtaggaatttaaaactataattttgatgtctttgtagtaatactaaataaaagtattagtactggaatgaattgtgtttttcttcacagccggttgctgaaccaatccccatctgtagtttctgtcttggtacaaaagaacaaaaccgagaaaagaagccagaggaactcatctcctgtgccgactgtggcaacagtggtatgtgatttccttctgtttttcttctaaaatgtgttacgaaggcaagcggaaagtatgttgacttgagtttgtatccttgatccttatgagattaatacagtcatacatcttttaattatgggggataagttctgagaaacatgtctttagaaggtttcatcatcgtgtgaacatcatcgagtgttctgacacaaaccaagagggatggcctactacacatctgggttatgtggtgtagtctgttgctcataggctcaaacccgtacagtactgaatattgtaggcagttgtaacactggtgaatatttgtgtatctaaacatatctaaatgtagaaaaggtacagtaaaaatacagtagtatgaccttacggggctacagtcatatgtggtctggttttttgttgtttgtttttgagacagagtcttcctctgtcacccaggctggagtgtagtggcgtgatcttggttcactgcaacctctgcctcctgagttcaagcaattttccagcctcagcctcccgagtaggtgggattacaggtgcctgccaccacacctggctaatttttatatttttagtagagacaaggtttcaccatattggccaggctggtctcaaactcccgacctcaggtgatctgcctgccttggcctcccaaagtgctgatattacagatgtgagccaccacacccggccatatgtgggctgtatttgattgaaacgtcattgtgtggtgcatgactgtattttaatttgattatggttttaggtgactgagatgagcttctgtactagggagggatttgaatatatagctgaaatgtgtaattcagttaatttaaatcaggtcttagtttttttttatatatataaaacactttctgtgggtttattttttcctcttggtctttacatttcagtatttaacatctgcttaaatcacagcaatcagtttgaagttattgctggtttctttaataatcgctacttcgtctttcttgatttatgcctcaggcttgatgaatagaaccaggatgataacagatttgtttttcttgatggaaacttacatatgtcacattgggaaatagtgttgatactgcagtctagcgagcaatgtgaaattctaggccctaagaaagattttgcagaatctcctaatttgccagttccagagatattcttgctctacatttcaagaactcacaagatcggccaggcgcagtggcttacgcctgtaatcccagcattttgggaggccgaggcgggcagatcacaaggtcaagagatcgagaccatcctggccaacatggtgaaaccccatcactactaaaaatacaaaaattagctgggcgtggtggttcgcacctgtagtcccagctactcaggagactgaggcaggataattgcttgaatccaggaggcagaggttgtggtgagctgagatggcgtcactgcactccagcctggcaacagagcgagactctgtcttaaattaaaacaaacaaacaaacaaaaaaaaaacttacaagaccttacaggaaggccttagcaaaccagcattatctttgaccattggcttaattttcagtgttttatagtgataacaaccatgatttagttcagaaaacagaaaccacactacatacttcaagaggaaggaagttaagtataagaattaggtatttgtgaaatcattgtcagggctgaagaagcaagctggaggttgggctttaaggactgactctggggtcactgcagaactgacccatctgaggagttactgtgtctgcctctatctggaagaggtgcaagcaggggggagtccactgcacaacagttgcgctctgtagttggtgctgaagtgctaagtttggccatcattacaatagctctagatacctacgagggagaagcatggatacggttgttaccatgactttgcttatcattagaaaatagtactaggaggaggatgatctttgctttgtttttacctttcgaatatccctggagaacacatccacttgtcagaacttagagcctagctgyaaaggagtcttaagaagtatgattttttagcttttcagtttttatgcatagtagaaggtgagaacagatcttgagtgctaggtagtcatatccagcgtgttgtcacaaaccagaatgaactctggatggatttcatagttaaatataaaccgtaaatcatgaaagattagatgaaaatataatggcatgccatacaatgcagttatttccaaattccctaattaaaacccaaatatataaaacatagaatgagttgttctaggtggggtgggaatgaaaccgaggagaggaagtgttgtgtctgcagccctgccgtctaagtagcattatatttgaggtggtctgtgcgtctctctaagctaaggatgagcataatttgaaaactattactgtagcggtaactttttttttttttttttgagacagtctcactctgttgcccaggctggagtgcagtggcgtgatctcggctcactgcaagctctgcctcccgggttcacgccattctcctgcctcagcctccggagtagctgggattacaggtgcctgccaccacgcccggctaatttttggtatttttagtagaggtggggtttcaccatctctacttcaccaggatggtctcgatctcctgacctcgtgatcctcccgccttggcctcccaaagtgttgggattacaggcgtgaaccactgtgcccagcccctgtagcggtaacttttaaagaaattgtagaacaattaactactagttatctgttgctgcagaaataaattactctaaatcttagcagcttaaagcaacaaaacattttttacttcatactgtttctgtaggtcaggaatttgggagttgcttatctgggtggttttgacttggtatctttcatgaggttgctgccaagattttaactggtgctgcagtcatctgaaggcttccacgatggctcatttacctggctggcaagttgctgctgccacgggcttgtcgacaagaagcttcagttccgtgccatgtggacatcttcacaggactgcatgcatgcctgcagcatggcagctggcctcccccgatgagtgtctgagagagagtgaggtggaatctgcagtgtgttttataacctggccttagagtcacactgtgttatttcagcaatatcttcttggttatgcagatcaacccagttcattatgagagggagttgtaagagtatgactagcaggaggcaagaatgcctagggagcagcctggagactggctgtcacaatagccaaagaagaacagcatgggcatagctggatacatgaacgttgatattttctaaattaaaaagtaacatgcttaaagtagagcaagaataatttgggggaaaataactgctttaaatatggcaaagggccaaaagctatataagtataaagaacatgtttacatttctaagcatgaagtccaaagagcagagcctgtgaactggcaatttatatgaaagaaaactaatagttgagcctatgaaaagtgttttactcaagtagtaataggaacacataccacagtagcagtgaagtatcattgtatagcgtttataataatcacaattgaaatataacagacctagagctcatgtagttgtgctaaaacacttgttcttttgctggtggcactgcatattatatcatagtttttggaaaatgttttggcagtgcatatcaagctataaaaatgtttaatacatttgactcaccaatcccactttcaggaattcattctaagggattaaaagaagtaaagaatctgtaaacatgaaataattcattttagtgttccgtagtctcagtatttaacaatagggaaatgttcatgcaggttatagtatatcagtcagtggaatatgatcagtttaaggaatataaagtttacttaaaatttaaaataaaacaaaaactgtatgtttgctaaaattacagtcatgcagagctttcagctagtttaaacaggaaagtctaacataaaaatggctattattctaggatgataggattgtgggtgaaattttcacacctcttggattttccttcagtgttagtgatgttttgataataaacttgctatctcataaaagagaaaatcctttaggaatagaaaagagaggagaagatttaacaagccctttctctcaccaaagaaaaataagcacgaccaacttttagaggagagggacagctcttttcagttgaggggaaattggctacccttaatttttgagaatcagactgataactgactcttggaagaggaagcatttttttctcttgctattcattctgagcacagtagaaatactgcttttggttttagttttagcttgcatgccttaaattgtgagcagataactcactttaagtgatggtatttttattatatacaggagtcccccttattcttggaggtttcaagacccccagtggatgcttgaaaccttggataaaaccgaactctgtatatggtgctatgtttttccctgtgcatgtgcatacatacatataataaagtttaatttataaattaggcacagtaagaggttaagaataatagataacaaaatagaacaattataacaacatgccaccatcactagttttgtgctttgggaccattatgaagtaaaataagggtgactccaacacaagcatgataataacactagcatggtgataccagcaacagtctgataacccagacaaccactaagtgactaacaaatgggtagtgtatgcagtgtgggtgatcgcagcccagctgggacagcagatctcattatgctactcagaacagtgtgcggcttaaaacttaggagttgcttgtttaatattttcacactgcagtagactgtgggtaactaaagcctcagaaagcaaaactgcggataaggggactaactgtattttttaaattacaaaagtaaaacattgtcatttaaaaaatgacagcacaaaagggtataaactgagacataaaatccttcttgatatatatagctcagttttctaggatgttatcagtgtaaacagcttttttgtatattcagtaatgcatatatgagcatttctcatatatgaacatatatgtattcatatatatacatatataccggatatgtacacacataatgctttgatgtaggcttaataaaagtttggagtttgtcaagttttttttaataatcaaattgtggggaggggtcctaacttctctttaacattaataaaactgaattgtggtgccaagtcctgatgagaaatgtgtggcaggcttcctggtgcatcttgctttatttgatatatattttgtatttaagatgattgcctttttctacatcatttctttagtactataatagcaaaatagttcttgattgtttcattcatgaatgttctccctcgtattaggccatccatcctgtttaaagttttcccctgaactaacggttcgagtgaaggccttacggtggcagtgcatcgagtgtaaaacatgcagctcctgtcgagatcaaggcaaaaatgcggtgagtatctctgccttctaatatgggtgtttcatttagtagtagaatgtacsaccagcattttcatctaagtatgactggttatttttcagacacttggtccagtagcatttagaatagccggtagtctctttaaactacatgtcattagtttagaatgcttgctaatttagacttcagttatgtctaggtaatttgtaaagcacttaattatatatttgcagagagactaagccacattaaagaaatactccccaaatttctttgagcagtacagaggcattcatttaggatggtcagttgatatattaattacaagtcgcccttttctcattattaaagcagaccagggttagcttatttctggttattggatatacttgaaactaatgaaactttagttctttatcaaagattggctggaacataactttttgctaactctatttacatagttaatacaaattaaggaaacttttaatattatggtcactyatctcttttatttatttatttwttttgagaaggagtctcactctgtcgcccaggctggagtgcagtggcacgatcttggctcactgcaacctctgcctctctggttcaagcagttctcctgcctcagccttctgagtagctgggattacaggcacatgccaccatgcccgtctaatttttgtatttttagtagggacagggtttcaccatgttggtcaggctagtctcgaactcctgacctcatgatccacccgcctcgacctcccagagtgttgggattacaggcgtgagccattgcgcctggcttatctctttttttaagatccctgaagctttctaggttttatgcagtcatgatygtaacatgtttctgcttcataaggttaagcaaaactgtcctttcttttttctaataggataacatgctcttttgtgattcatgtgaccgaggttttcacatggagtgttgtgatccgccactcacccgtatgccaaaaggtgagaaatactttctgaaataaaactgggaatataaaggaggatgttagtgaaagcacattttatctactttgttaaatgaaataataattggatctttctttttgaggttgtataagtaggaagagaactgtcaccttaaaaggtggggggatagtctttctgagtgggcatcttaacattcttacatgatacggatttattgttattttcaatatctaggcatccatcaatggtgaagtggttcatttatacatatttgccagtctctagctagaagataaaatacttgccttaaatatatcttgaaatatctctttattgaaaggaggaaataaaatagtattaggtcgtgttgattatatcactgcttagcacttttgagggccctagagctatagagatatggtttattcaaaacttaaaaaaaaaacctttttatgaaatactttatgaaataaaaaggttttttgttgttgttgttgttgttttaatgaaatacattctgaacaaataagtgtccagattgtaagggcgcagcttaatgttactcttttcttttgattcctgttcattgagaggtatttagtttgggcatagttgcctcatggttggacttccatattcatatgcttataggttctttaaaaaaaacttcagccagacccctctttttgtcctatcacaaattccattttaactctgattttataatttataggcttcttaagtaaaatgcctataggatatttcataatatttgtttggaaaaaaatttcctgttgatagaaaatgacttaaccgtactttgtagtcatgttaacactttaggtttttacttgaattcacttattccaccccctcacccatggagtctcactctgtcgcccaggatcttggctcactgcagcctccacctatcaggttcaaagcgattctctgcctcagcctcccatgtagctgggactacaggcgtaccacgacacctggctaatttttgtatttttagtagagatggggttttgccatgttggccaggctcgtcttgaactcctggcctcaagtgatctgttcgcctcggcctcccaaagtgctgggattacaggcatgagccaccgcgcccagcctgaattcacttactgattgttactttttgaaacgtcttcaatttataaatactaaagaataaatacccactttttccatttatgtgaagtctgagcaaggggccttctaagagtcctaagaaaggttttttttttggagttggaatctcactctgttgcccaggctggagcccaccttggcctcccaaagtgttgggattacaggcgtgagccaccatgcctggcttgcagctaatgttttttgtagagatgcagtttcaccatgttggccaggcttgtctcaaactcctgacctcaggtaatccgcccacctcagccccccaaagtgatgggattacaggcatgagccactgtgcccagtcaagaaacatttccttaggactcctttcttgtgtgtttaacttctacaaaagagattatatagcagctttaggcaggaaactttttttttgagacggagtctcactctgtcgcccaggctggaatgcagtggtgcaatctcggctcactgcaacctccgcctcctgggttcaaacgattctcctgccttagcctcccgagtagctgggactacaggcacgtaccaccatgcccagctaatttttgtatttttagtagagacagggtttcaccatgttggccaggctggtcttaaactcctgacctcaggtgatccacccgcctcagcctcagtggacttcaagtgcagtcagtggacttccagtgcaggcttgaaggtgtatgtgagtctcttccaattatttgtagaattttgtgtgtatatgttttaatgtttattttggattggagggggtattcatcagattttctaatgacagtcttttacctgaaaaagttaagatcctgacttaagactatctgaaacctttcagtgtatttatgtctgtcacacttctatgtggaattttatttttttataggcatgtggatatgtcaaatatgtcgacctaggaaaaaaggacgaaaacttctacaaaagaaggcagcacagataaaacggcgctatactaatccaataggacgtccaaaaaacaggttaaakaaacaaaacacggtgtaagttgtacttgtggcaaggtgaggggagaaaaggatagggtcttctctatagtgtaggattcacttgttttctctatgaaaaaaattccattgtcatatctggcacttttatataataataatggctaacacttattcagcccttaataagtgccagacactattctaagtgctttatatgcattgaattgtttaattctgccaacaacccagtgaaatatagctgctgctgttactttcatttttcaaaggaagaaactaaggcatagtaaatgttgaactgggatgaraatccgagtagtctggcaccaaagtctgactcttaaccattgctttatgttgcttctcttatataaaaacaggaaagaaaaagttgttactgtgacatttcacatgtcactctcctgatcttgtctcagttgttaatatctattaggtgtacaaatcactggataggttcttcctattgaggtgatggctaagtcccatttttgtgttctttggatgtaaaataatttgaatgttttcatctattagcagaaatcagaaattgtggactagaaagctgggctatgtctggaggaggtggggcaagattcagtagctagttttgtctttttaaaaatgtctgtagtaactcacctttgatgatatgtaaacgtcttcaggcttgtcaacctccctttattatcaaaagttttacttactttttttacacgtaagactatcttgaaggtgatataactgaaatgaatgggcattagcagcctgaaatgtacagaaccaatattgtagtctatattcaaaatcttaaatcaagctttgattttcctataaaatgatcttttgattcctggccttcgaagaataacccatccttgtgttttagagataaaagtataactttcagttggtgcagagatcacagtgtagtagaactttatacctggaaggatcttagttgttcttagtccagttctcattttacagatgaaggcactgacatatgtttagaaaaaatgtgatttgtccaagtcgtacagctagtaagagagaattatgactagaacaagtcttctgactcctggcctgtcattctttgcactataagtaggcttcctggcaatagatgtttctaataataatattaattttcattcacagagtactatttatagtttgcagaatattcttaataatatagattttaataaagctgtaggttacttactaattatatgttatgtattaaaarggaaccttacaagtatcttttttaatacttaccctttcccctgtttaattgtttagatcaaaaggtcccttcagcaaagttcgaactggccctggaaggggtaggaaacgaaaaatcactctttccagccaatcagcatcatcatcatcagaagaaggatatttagagcggatagatggcttggacttctgcagagatagcaatgtctccttgaagttcaacaagaaaaccaaagggctcattgatggccttaccaaattttttaccccttcccctgatgggcggaaagctcggggggaagtggtggactactctgagcaatatcgaatcagaaagaggggcaacaggaaatcaagcacttcagattggcccacaggtaagagtttagaacagacttagaaacaaatagtattctgtacatgtattattcgggataacacyaattatctataatggatttatatttgattattaacaattggttatagaatataagaacacattgaaaaaacatgtagatgatactgaggtgataactgtggcaggaatttagaggatggaaataaagttgcagaatgggacagtaggaactcttaggcaaaaggaagctgcttttttgtagaaccacaaagaatctgcctagagaaacttggggtgtaaccttgaggattactttacatttcacaaattactaaagaaatcatatggtgaatgttatgatgcctgcttattccaggaaggaaactggaaagaatagaactgggtgaaatgctgttgatctaagcataaaaaaaagaccaaaatatttgcagatgtgatgaggtcattgacttttctacttcagatcttgacaaatatagttgtaagtcatggattgcacttaaaaagggagagacagaaccacagctccaggctgcttatgtatcaggctaagttccctaattttcaaagtagaaaacatctgtggagaggacttaataatgtggcaaatcattcaagtcagaggagaagaatttgattaactgtccaataaattaaagcttaaaatagtcttattgctgagccttgaatttagagatactaaccctgtgaaggaagtagaaagggcttgaagaaagtagaatgagaatgaactcttttggaccacaagggccagaggtgtagtgtctcatctactacaagagaattccctgaccttggtttcctccctgaatgtctccttggtgagggagagtgtattcactgctctcattcgtggttgattgtccagtgcaggagagaaagtccttgtaattgtcagagtcccctttgtatgctttattgattggtcttttaccatagtgatgatcaactaattactctttaagcattcaagactcttcatgtctttatcaacctgtagataagttcctgatctgagcatgtttatctaagaaaatatgcaatccgtttagattaaactaggaaagaatctcagagcaaatcctaatgaaagacatttttgaattaaccatttgtactggagacggtttattagaagaatctactagaaagcttttgaaatagaaattgttagagcaagtgtatcaagtatatggagaaccaatattgaatttttgacagtggtgtgagcgtttgctttaataggctctgtcattttctttatgaattataaagtttaagtaccgaatgctgtattagagaggtgcatgcatcatgcactagggggcattaaagtcacatagtacctttagattgtacttttttcttccagtttgagaatgttgtcaacagtgagtccttgacttttttcttcttgtgttaagttaataacagatggcccatatgtgcagttgacttgagaactgtcaccaattggtcttttcagccatacttataaagagagcaaatgagcccaacagcagtgtcatcttcaaatgcaaaggataatgatcttcataagtcccaaatactctcttcactagttttttgccaacttgaggaagttccatcatttagtagataattatcatacgttttcatatttacccagatgattatcatctgggtaaatagagtttgtgctttaaaaggacagtgttttaaagtttgtgctttaactttaaaagggcacccagaatgtgatgggagttagtactgctgacatcagttaaggtagctactcaagaggtttttttgaacgttgatgcattaaacctatactaaaagtgtcaaatttatactatttcaaaatgaaatttatattccttatatcatttttctgtctgcctttctgtgtattaaaatgtaatctttaatgaagtttaaatttagttatataatatttttaggaagctttaagacaattcaggatttccactataaggcagatttaatacataaatattatttattgagtagcattcttctaagagtcagtttaatgctrtattcttcgttatatattaagttcttcaaattgaaataaagacctgaaattttttctagttcatgtattaatctggggacagttaacatgtgagctctttttttatatgtagacaatcaggatggctgggatggcaaacaagaaaatgaggagcgactttttgggagccaggaaatcatgactgagaaagatatggaattatttcgtgatatccaagaacaagcactgcaggtaaagttggatattcaggttagacaatcaagcaacttgttcatggctgagaaacagcagattaattacattgtgggttaagcagtaacagcagtttgcctaatctcagaatagttgtggtttgtgtgtatatgtagttctgctgtttataatattcctttcaaacccatgataactgctttggttttgcagataagcacatggctttgactatcaatattaaataagcttggtttattttttgtcttactgtatgaagaagaatttgggatttgaccaaaaacaaacaaaaaacaagcttctcatgagtgataaaacacctatatttattaattcaagaagtatttcatgcctgtaatcctagcactttgccaaggtgggtggattgcttgagtctgggagtttgagaccagctggggcaaaatggcaaaaccccatctcaaaaaaaaaatagaaaaattagccaggtatgttggtgcacacctgtagtcacagctatttaggaggctgaggcaggagaattgcttgagctggggaaatggaggttgcagtgacctgagatcatgccactgtactccagcctgggtgacagagtgagaccctgtcttccaaaaaaaaaaaaattgcaattctttgtgacacatggcaagatcrtaaatatatagacagagtctatgtgccacatgctggagatgccagtgaatgactgaattctttccctgaactataggagagatttgtgaataagtaatgtcattaatatgaaaagttcaattatagaatacttgatgttttgggagaatagggaagccagcttctacttctgcctggggaggtcagaggaggattcattgaggggccttaaaggatatgtaggagttgtacmtatcccttaaagggatatgtagggagttggttcttatataatcagaaggaacagaagtgaaggtggaatagacttgaagataggggaaaacatgcttaattgtgggaattaaaatggctcaggataaagaatatagggtgtggagaatggcaggaggtgagghtggaaaagtgcaggggctagatcataaaggctcttccagattatgttcatttattttttgtcttttccttctttgccaccaacaaatgtaccatgtaagccaagttctcttttatcttgaaaagaagaatttctaggctgggcacggtggctcacccctgtaatcccagcacattgggaggccgaggcgggtggatcacttgaggtcaggaattcgagaccagcctggccagcatggtgaaaccccgtctctactaaaaatacaaaaattagccggtggcacacgcctgtggtcccagctactcgggaggctgaggcagaagaatcacttgaatccgggaggtggaggttgcagtgagccgagatcgtgccacaccactccagcctgggcaacagagtgagactccatctcaaaaaaaaaaaaaaattctaaggctgatgccgagggttctagggaaaactcttcatattaagagacccagtggtggtgaatagactgttgatgtcggtcattatgtgagtacttttggaaaaataaaacagcagtacaaatactcagcacgcatttactcagcattctgctgtattatgatttaacaaaatattggctttgattcaggtggatctgggttcaagtcttgatctgtcatttactaacttctcctttgggcaggttgccctcaaagcttgtttcctttcatgctagtgagttattataggtactctagtagaaatctacatggacttcagtgggaactgaaaggaggcagtagttatgttcttcctgactgaaagaatttttttttctcctcccgagtaagttgcagacataatgtgttaatatccctttactcctaattttttgtgtgtatttcctaaaaacagaaatgttctcatacatgaccatggtccaatcatcaaatcaggaatttaacacaaattaagtactattatctaatttagttgtcacgtctctctagtctccttccaattgggaacagttcctcagtctttatctttcatgaccttgacagttttgaagtgcacaggtcatttatagaatgtcatcactttgagcttgttttatttttcatgattagaaaattccacaggtgtgctgtgtcctcctcagtgtgtcacatcagaaggcatgtaatatccaagttctcatcacaagtgctgctaacagtgaccacctggtttaggtggtatccatgtttcttctctaacattgctttctacctataattaagtatcttggggggacatactttgagacagaaatgcagataacctgtttttcatcaaacttttatctaccacatttagcatccagagatgatttttgcctgaatcatttactttgttggtggccaaacattattttctaattctatcatttctttgccatttattaattggcattctattgtaaggagaagctttttcttcttccwatttgtttattcattttgtttaaactcatagattattttatggttataatccattgctattagtatttattttgatgcttaaattgttccaaatttaggcagaggggaactcctttctagaagctcctctgtccttttaacacatcatcatcatttttatttacttctggccacagcaagatgttctaggctcttactgttgtagccatagattctggcttttagtggtgaacaagagtaaatggtagctctatcctgtacttgcttaggcccacagagatgtcatcttgattttttttttctctgtcatacttcacattcagtccatcagcaaatcctaatggttctgccttcagaatatgtctgtatttgctactgccaacccactgtcatctctggcttaggctgctataattgcctccagactaaacttgcttctgcttttgccaccaccccactctctagtctattttcttcatacagcggccagggtaattatttttgaacgtaggttggattataccacttccttgcttagaaaacctttcatgtcttacagtcttctttagaattaaaaaaaaaaaaaagagtctgttctctcatctccaaggctgtatatgattttgtgcctgcctccctctttggctgctctttttgctctcaggctactccagccacagccgcctcctcttcctcagacacaccaagcatgcctgccttgggcctttgcagtcgctgcaccttgcctcgatggcccttcctctagagtcgatgatttagtaggttcactgcccattccatttaggtcttgctcatatccacacgaaaatagcttacagcccattgtgtcactctatcccctgacctgcctgctttttctgcatagtacctaccacctcttgaatttaaattttttatttctagaatgtaagtgccttgagaacgaggcctttctttttttttttttttttaaattataccttaagttttagggtacatgtgcacaacgtgcaggtttgttacrtatatgtatacatgtgccatgttggtgtgctgcacccattaactcgtcatttacattagatatatctcctaatgctatccctcccccctcctcccaccccacaacaggccccggtgtgtgatgttccccttcctgtgtccatgtgttctcattgttcagttcccacctatgagtgagaacatgcggtgtttggtttttttgtccttacaataatttgctgagaatgatgatttccagcttcatccatgtccctacaaagaacataaactcatccttttttatggctgcatagtattccctggtgtatatgtgccacattttcttaatccagtctatcatttctggacatttgggttggttccaagtctttgctattgtgaatagtgccgcaataaacatacatgtgcatgtgtctttatagcagcatgatttataatcctttgggtatacacccagtaatgggatgactgggtcaaatggtatttctagttctagatccttgcggattcgccacactgtcttccatgattcttgaactagtttgcagtcccaccaacagtgtaaaagtgagaacgaggcctttctttttggtcactgctatctactgagtacttggaatatagtaaagrctcagtaaatatttgtttaatgaatggatattgaatgaaattttcttctgggagaaatggggcaggagttgaaataatagaaaggtgcaagaaggatgaccaaagagagttaaacgggttgctgagccctgctgaggctcggggagacagtgtaaatgcttattgacagtaatcgggctaatcctatgtttctttccagcatttgattaaactcagcattgtctgtgtgtgtattggcaccaaggaaataaacagctagatcttggaagtctagttcatgcttatttttgttggcagtgcactgaaattctgatgatggtgctatttctccatgaggcttattcatttagcatcatgcacctgccttggtaccagaactatagggcaaacaaaaagacacagactctgccttcatgaagcttttagtttcacaaacagacagataataaacactcataaaaataaaactgtacttacaaactgatagtcggaaggaaatgagaatgcagtgaggggttctgacgggctgggctaccttgctgagggttggggttggagtgtttatgagaagggaagacttttgaagaagtaacaatttatacatagttccaaaagagtattcaaaagtcagcagagtaaagagctagagaagaacatttcagagacaagtggattgcctatgtaaacgtctaagggtgtgaaagaggttgataaacttaaggaactgaagttcagtgtaactcaaatacagtgaacagaagagttgcataaggtgaagctggggaaatagactgaggccagaagttagaattggggtttttatcataattgcagtgggaagacattgaatggtttttagcaaggaaacagcaagatctgtttcattaaaaaatggtttttcttggctactacataaagagtggtttagaattaagcaagagtggaagctgggaaaccactttgcaggcttttccagtgatcaggatgagagaagatgttagctaggactagaggggtggtggtagaaatgggagagaagtggatggatttagatatattttggagttggaatcagcagaacttagtgatgagttttatgtgtagcttgaggaagcaagagatgatcaaagatgacttccaggttctctgacttaatttaataaagaaagtggtttgaagccacttgggaaagttcatgttgactagataagaggacattttgaataatgaaaggattcataaatayagtgcagaaagtcatttttgagagcatagatatagcttagatgatgcttgaacctgtgtttcaaaaattttgcaggtagattttattacagtgtctttggtagtcttacagcagcatcagcaaaagacatgataaaggaattaatattagaatccatccaactaataacacattgtttattgagtgcctgctatgttctagaaactatggtacggggaggggctatcagaaggacatagtttctgttctcttagagcttatagtctggaagggactatcttgaataatcaaactttgcatggaacattatctaagtcaaagataattgaaatatttagcaagatttttttcaaaaggagtcagccacttattggttttaattttttwaaaaaattattgcaggcagtagggtaagtatggatgtagtttgcctagtactgtgttccatcattagctatacaacatacacttccatgaaaaagagccacctctgaatacaaaagtggaagcataaaaaaattagtagtataggtttttgttctagaattttatttcaactatgatcttacgagcttggagaaactatttttcttaaaagactctgtcagtagaaagaagcatttgtgtgcatgtgtctttatagcagcatgatttatagtcctttgggtatatacccagtaatgggatggctgggtcaaatggtatttctagctctagatccctgaggaatcgccacactgacttccacagtggttgaactagtttacagtcccaccaacagtgtaaaagtgttcctatttctccacatcctctccagcacctgttgtttcctgactttttaatgattgccattctaactggtgtgagatgatatctcactgtggttttgatttgcatttctctgatggccagtgatggtgagcattttttcatgtgttttttggctgcataaatgtcttcttttgagaagtgtctgttcatgtcctttgcccactttttcatggggttgtttgtttttttcttgtaaatttgtttgagttcattgtagattctgtatattagccctttgtcagaagagtaggttgcaaaaattttgtcccattttgtgggttgcctgttcactctgatggtagtttcttttgctgtgcagaagctctttagtttaattagatcccatttgtcaattttggcttttgttgccgttgcttttggtgttttagacatgaagtccttgcccatgcctatgtcctgaatggtaatgcctaggttttcttctagggtttttatggttttaggtctaacgtttaagtctttaatccatcttgaattgatttttgtataaggtgtaaggaagggatccagtttcagctttctacatatgggtagccagttttcccagcaccatttattaaatagggaatcctttccccattgcttgtttttctcaggtttgtcaaagatcagatagttgtagatatgcgacgttatttctgagggctctgttctgttccattgatctatatctctgtcacatgcacacgtatgtttattgtggcactattcacaatagcaaagacttggaaccaacccaaatgtccaacaatgatagaccgggttaagaaaatgcggcacatatacaccatggaatactatgtagccataaaaaatgatgagttcatgtcctttgtagggacatggatgaaattggaaatcatcattctcagtaaactatcgcaagaacaaaaaaccaaacactgcatattctcactcataggtgggaattgaacagtgagaacacatggacacaggaaggggaacatcacactctgaggactgttgtggggtggggggagggaggagggatagcattgggagatatacctaatgctagatgacgagttagtgggtgcagcgcaccagcatgtcacatgtatacatatgtaactaacctgcacattgtgcacatgtaccctaaaacttaaagtataataaaaataaataaataaataaataaataaataaataaataaataaatttttttttttaaaaaaaagaaagacgcgtttgtattcagttcattccagtggagcatgaccaccttcttgaaatatatagaatgatttttacataaaatatcaaagagcacattgtattttcatacagattttaatgctttctgattctgaaggattcctttggtttttgtatggttctggaaagttacagagcatttttgaaatctgtgcgggttattaaaatttctttgcgtgaagagttaaatcattattaaaaatacagtaagctagtttcaacaactttattaaccccatgatgtagaggtgttaccccattttacatatgaggaaaccaacactattagttcagtgacttcctgtaagtttttatgttagtggagccgaaattaaaacttaggccatgtgacttctaattctgtacccttaatcacaataacatcctgcattattctgtatacgggatgtcatgggggtagcaaaatcattaggcatgtgctaagtgcaggcaggtaaaggtgcataggaagatacacagcagacaatagcttagagtaccaatgaaacatagtgcattgctgtattaaatgattcagacttgtctcagatgttcacagtatactaagatgtgtgagaattggcgcaacctgagatgatcacagaagcagcagtcctaaggaatgatgaggatttaggtagatggagagaactagggcttatcagatggagtaaacaacattaacttcagctttgaggaagcaatgactactatacaggagtccccgcgtatccaccagtgatacgctccaagatccccagtagatgcctgaaaccgtggactgtactgaaccctgtatgtactgtattgtgttacatgaatgtagtctgtctctctctaaatctcttattgtactattgtactgtactaactcttctgacggtgtgagatgataaaatttgcaccgaggctgacgacaggtaactagaacctcgaaaagcaaagctggggataaggggagactactataaataattccagctggagggcaaagacgtattatctgtgtattccaagaacctgccactgagatagcaagcagaagctcacatttatttggcactcactgcatgaatggcatagtgctgtaagttctgtgcaaatatcaactcgtttaagcttttcaacaaatctgatagtgacttgcccaactaaggtgattcagccgagataggatttgaactgtgctagccttttctrgttcccaggctcttaactactattttaataagttgtgctaaattatccaatgaactaaaaatacatctatgcggcctttaatatgtgacttatatttaatgggtaaatgccttaacacagtaaacatcgccccacctaccattcctactttcagcagcatcaaggagacatcacttaacagcaaaaagatgtcatgggggtaccttaaaatcccgtcatgccgaaactgacatcttgttactagctttcaaaatgctccaaaatgcagcttaatactagtaattcagtgtattaccattgcccaacagatgttccaccctgtcttatctcaaactaaactccagctattcctcactttgcatggtgcaatgttaactgaaacccatgcttatcaaactaaagtagattgaaggaacaggagatgatcaaagatgacttccaggttctctgacgctgtaataaaaaaagtggtttgaagccagttgggaaagttcatcttggctagataagaggatgttttgaataataaaaagactcataaaggtaatgcagaaagtcatttttgagggcatagatacagcttagaaactgcttcacctgtgttagggttggcaaaatatggcctgtggcccagtcccatccacagcctgttttgtatgacctgcaagctgaggatggttttaatatttttaaacagttggacaaaaataaaaagaataatatttatggacatgtgaaaattatgtgaaaaatgttagcgttcgtaaataaagttttattacaacatacaaaaaacccatgcatatcagaactaaggtcaaatctgtcacctcagaagcacggacacaattctgatgtgtacctgtttccattaacacagtgccatcaaaaacaaggactgcctgtcttacaacacctttatgggcagatactgtgttttctatatcatctccacagtgtgacttgcatgtagtaggtcctcaaatatttgttgatctgatgggccaataatcaccctatctcctgtatttacagtaatcccccttttatctgtggttttgctttccatggtttcagttacccttggcttgccaaggtctgaattttattatcatcgtctcctcctcctcatcatcatcagaagggtgcataccatgcaataggatattttgagagagaccacattcacgtaactgttattacagtacatcgttttaattgttctgtttttagttattgttgttaatctcttactgtgcctaatttataaattaaatatcatgggtatggatgaataggaaaaaacatagtatatacaggttgactatcccttatccaaaatgcttgggaccagaagtgttttggattttgattttttttttttttttttcagattttggaatatttgcatcatatgcttagccgtcgagcatcctgaattcaaaatctgcagtgttcttacgagcatttcgtttgagtatcattagtgctcaaaacgtttcagattttggagcatttcaggtttcagattttcagattagggatactcaacttgtataacatttaatactatctgcagttttcaggtattcactgtaggttttggaaaggtgtattcccagtgggtggataarggggactattgaataaacaagtaattaaagccatgtggttagtaatagataccctcttattatatgtaaaatactatattcagcattatatattaatttgtttcatttaayacaactttattattaattacttggcctcatcttacaaatgaagaaatggaaacattagaaggattgttttasctagagttataaattgttaagtttcagagtcaatatttgaaccctggtattctgactccatggccttaactgcttaatttatgatatagtattactgtggagatatgcataaattgcagtgagaatgaacaggaagacatctagggatgttattgttctatttttagttattgtggttaactaaaattttaagtctttgtagaggaggtgacatttgtgtagggtgctgaagggatgagtaagtttactattggagaagagtgagaaggcatttctagtagcaagtttgggtgtgagaaatcgtgtattctcggagctgtgtgcagttggttggagttcaaacaagagatgatattggaggggtactagatcatgaagattttgtgtttcatattaaggagtttgtacttaatcttgcaggtaaagtagctctttaaagtagttaagtagtagctaaatagctcttgaggaactgctaaagaatttctaaaaagtggatgacatcatatttgtattttagaaactcaagtctggtgatattgtcagcaatggattgaggaacacctgagcaagggaccagtcagatgattacagtagtcaaaatgaaaagtgactggggcctaaatgaaggtagaagagatagataggagacagagatagataatcgttttgagaaagacttaagatagaatggaaaagactgctgttggattgggagttaggattgaaggagagggcagaaccaagtaggtcttctagtgttctatttggagtagatgatggtattacatgtaggaatataggaaaagaagcttatttagatggaagaagagaccatgcttacacagttgtgggattgtgtgaaatctaaagtggagaactttggtagatggttgtgtacatgtatatacaggagaccttgggtgggagatttgctgtgttaccagcacatgtgattgtttaaaatttttatcaaagataatatttatctaataataaatattactaaatactggctaccatgttccaagcactagagatttagcagtgaacaaaacattaaataaaaaatgtcttcctcttgggagcttacagtttagtttgggttggaatgggttaaaataaatggtatgccatgtggtagtgttatggagaaaaaagcaggggaggaagagggagaattcagagggagaggattaatgtatgcagtattaaattggtcaggtggggactgtctctctgacatttagcaaaaacttgaaggaggtgaggggatgaaacatgtaggtaacgggggaatagcattccaggcataggaacaggaaatgcaaagacccgagtcacaatttgtgcttggcatgatcaaggaagtacaaggaggccagtgtgactagagccaaatacataaggctcaaaatagcagatgacaaggacagaagggtaatggaaggctggcttttgtagggtcttcttggccattgtaaggactttgacttttactctgaatgagatgggaaccctgggagggttttgagcagaagaatgactttggttttaacaggatttctctggctcctgtgtagattgagggggcggggggcagtatacaagcagggagaactttgggaaactcttgaaattattgaagtaagagacatggtgtttggatcatggtggtagtggtggaattggaattctgagtatgttttgaaggtagacccattgggatatgttgatgcattgtgaaagcagggagtccgagacgatgccagaacacagttggaagacggagttgccatctactgagatggggaaataggaagagcacatttggggaaaagatttaggagtttgattttggatgtgttaaacctgatgtgagaggggatatcaagtagatagtgggatatgtgtctctggagttcaaagaacaggtctgggctgaaattttcaattcaggactcaccagcaagtaggttgtttttttgaaaaatgagactagatgagatcaccaagggagaagagaagaactttgagtctaggttattccaacttttagagattggagaaactgagaaggaatggccagtgaagtaggaaaaaaaacatgaaggtgtagttccttagaagctaagtgaagaatgtgttgtaagaaggaaggatcagtttttaaattctgcaaataggccaagtaagaagagaactgaaaattgactgtccagcttagcaacaaggaagtaatcttgagaaactgtttccatgatggggacaggggagggtgaagagataattggagtggtttcaagaaagaatggaaggagaaattggttatagtagtaatatgtggccattgttttgaggttttttacagtaattaggagcagagaaagggagagttggatagagctgtgagggctaaagaagatacttttttttttttttttttttttgagatggagtctcgctctgtcaccaggctggagtgcagtggcaccatctcggctcattgcaaccgccacgtcccgggttcaagggattctcctgcctcagcctcccgagtagctggtactacaggtgtgcgccaccactcccaactaatttttctatttttagtagggacagggtttcaccatgttggccaggatggtctcgatctcttgaccttgtgacccgcccaccttggcctcccaaagtgttaggattacaggggtgagccaccatgcccacacacccctctccccctttttaaaatatggaatgaataacagctgtttgtatgctgatggaatgctctggtagagggaaagctgatgatgcagaagataggaggggaactgctgggtgatgttctttggctagggagcaggaagatgttatctcatgcacaaacggaagccgtgggcttaggagctcaatctttagccatagtattggtgaaaggcaggatgtgtggcacaaaggtggaggcagacagatgtgggtgggaaaaattgcagaagttttcttttgattttgtccagtttagtgcagtaggaagcaaaagcattggctgaaagtgaaggtggagtaagcagtgttggaggcttgagcagaggagaaagggtgcagttgtctttcagaacgggagagtgaatggagtaggaagcatcaggacctgcttgaggtttgtgggtaggtgtataatgtgagactgggtagcatgattctctgtttttctccacccatattcacattaaggtaataacttcgattatgtgaagagttgaatttaacaggggttaggattttgttgtgaaattagaagagaaactagagagttaaaggtctatgcaaagggtggaattacagggaaaaagaccttagaatctaagctgcgtagagagaaaggagggtgtggggagagtggaaagctgatggaagcactggattatgggtcctccggatggaaaaggtaagatggccgaggacagaattctagattttgtcartatttaatggtaaaagaattagcaaaggagatggataaagagaagtctgagtgtagagcaaaaaggcttaggaaaagggaaagataggtcacaatatccagaatcctgaaatttaaggagtcctgaaaatttgaaaaaaaataattgtggtaaaatatacataatgtaaaagttattttaaccagacttttttttttttttttttttgagacggagtcttactctgtcacccaggctggagtacagcggcgtcatcttggctcactgcaagctccgcctcccgggttctcgccattctttgtatttttagtagagacggggtttcaccttgctagccaggatggtctcgatcgtgatccgccggccttggcctcccaaagtgctgggattacaggcatgagccactgcgcccggcctaaccagaccatttttaagtgtacaattcagtggcattaaagacattcaccttgttgtgcaatcatcaccatcatctatttccagaactttttcatcttgcaaaactggaactctgtacccattaaacaactcccaaccccccacccctacccccacccctggtaagcatcattctgtcttctgcctttattaatttgtctactctaggtaccataagtagaattatacaatatttgtccttttgtgtctggctgtttcacttagcataatgtccccaaggttcatatgtattttagcctgtgtcagaattgccttccttgtattttttttttttttctttaaagacagagtcttgcactgttgcccaggctggagtgcagttgcgcgatcttggctcactgcaacctctgcctcccgggttcaagtgtttcttctgcctcagcctcccgagtagctgggactacaggcatgtgccatacacccagctaattattgtatttttagtagagacggggtttcaccacgttggccaggatggtctcaatctcttgacctcatgatctgcccaccttggcctcccagagtgctgggattacaggcgtgagccaccagcgcccaaccattgccttcctttttaaggctggagaatattccattgtacgtatgtaccacatttggtttatccattcatctgtcagtggatacttgggttgtaaatagtgctgctatgaacatgagtatgcaaatagatacccatatacaaagaactgctttcagttctgtggggtctataatcagcagtggaattgctagattatgtggtaattctgtttacttttttgaggaaccatcatactgttttccacagcagctgtgccattttgtattcccgccagcaatgggacaagggttctgatttttccacatcttcaccaacatctgttattttctggtgttttgcatttaaaaataataaccatcctaatgggtgtgaagtagtatctgattgtggtttgatttacattttcctaattattagtgatgttgagcatcttttcatgagcttattggccatctgtatatcttctttggagaatggaaagaaacttttccaacttttttttttttttttttttcgagacagagtctggctctgtcacccaggctggagtgcagtggcgcgatctgggctcattgcaagctctgcctcctgggttcaccccattctcctgcctcagcctctgagtagctgggactacaggtgcccgccaccaagctcctcagctaattttttgtatttttagtagagatggggtttcaccttgttagccaggatggtctcgatctcctgacctcgtgatccgcccacctcagcctcccagagtgctgggattacaggcgtgagccaccacgcccggccttttctaactcattttgcaataaagtcccacttgacctgaactgagttactgacaaaaacatgatctgagctgatgtgagactatttgtattccttacttatgccagttaatgtgaatattcatatgctttgctaaagaaattttagtgtgtctgattatggagtgctgctccaaatcctactagggctatacacatgcatgtactatacacatatatgtactaatacttttctaaaatcagaaaaattcagaattccaaaacacattctactccagtccaagggttttgggttaaaagtttgtggacttgtagcttcatttctttggaaaaccaagttcccgtttttaaaaacttacccataaactttgggaatttagggaggaattagttgagggctgtcgttacttccgtcacatctcaacccatgtcattcttttctgtctttatgcttcactcgctgttcctgcccggtgcttttgcctcttaacctgaggcttatctgargcttattttttcatctgcagagtgggtatattgttttctactttgaaggatggattgtggggaccaaaggaggtaacgacataaggctcaggtcagagtctagcacaataggtgctccacgaacatgattttctctagtccttaaattcatgctctctctgttgtggagcatgtgaattcattctttcatacctctttcatcatgtaacttttaatccctaatgaatggaattacttactgtagtgtttctgtgggaaaatgttcaaatgccagaaagccatctcttctccccacattcccagcctcacactgataataaaggggtacctccctctctcctcaaaacattgcacccccttggggaatggagagggaagggcaagtgagagcgctccagtggacagatgggggaaggcagcagctctgtgtttacagaaattgttaaattatttacacaattttggtgtccctaccagatccagagttggggatactgcaagaatggccttttttatgttacaaactggaattagatgagtcatttaattgaagcttaagtttttgtagaagagtaatactcttttcatataaactggtggtaataaaagctttattatctagcagtaggcataaagttttcttttggtttagcccaattattagtgtatttaatccacccccttgctaccccctgttagttatcttagattaaaaggtcaattctagcctggaacatacgtcttcttttaaataatttggcatatttaaattaggaggacatgaagtggcagaatttgagttaaacatttaaatatattttgtgcccttgattatattagacacctgctgctttggaaagtcacatgtttagcgaaaacgtactttggttgaaatgttaaaataaaaagacctagcaaaggtaaccttgtagttcagatatgacagtttgattttggctaggactggaatgagtggtttctgtgtagccatttcttcctccctgtgtagagagccttgctgatttctaaatcttcgtaaaaggaaacacccttgctgtggaggcttgctcaggggagctgggagtggaggcgggctcacacatgagcgcatgtgcaggaacgtttcacggtgcaaaggttaaaggcgggtgtgggcagaggggaacctaccacaggtcccattctggacagacgtgcgcagttgtggtgatgtgcaaacagctgtactggaactggatatccactttcacatcgggcatccgcctagaagagcagcgggcagctgatgggaagaccctcaaacaacagacagtgccgcagcaggtgcatgacttcagcttttgggctttctatctgatccttgcctcaggaagttagatctggtttctggtatttagttattttgaaagtttcctatactgttgttattactttgagttgtgaagatagatgaaaagatagtactttatgagttagagtagttgattctagaatgtagtttaaaaacagcctttaaaaaatctttttacaaagttctgtttgggttttgagaaatgaaagaaatcttattttaaccctgtattatgtattcttcattgtttttggttttgtatttggaggagccccagtacttggtggtgttataacacaattcatcccacaaacagatctttgtcttttgttttgaggtgtctaaggaagagcttgaggtttcatttggctacattccagtatgaaacctgagataagtcccttggccttttataaaagagaatggttagaaagaccagaaggtctctaatgagttatggtgaagaggcttctttaaacggatttatataaaaccaatgaataaaaatttcttttagttttgttataaaatatgtatgtgtgtctgcatgctccaacaagggatttttactagtctcttagtggtctttaaagcataaaattgaaggataatttcagttatccttttggggaagagttattaatgcttgtttttggttaggctaaactcttttgtctttttcttgtcagttagtatttgtagagcatccatgatatatctgcactcacacacatggacatgagtgtgtatatgcatctgttgctagactgggtgcagagcaagtcatgttgcccttgagttaacatgttaagacccttaacagcctttattttcttgagctacgtacttatgtttgaatttctratctggaaagtcagggaagtcataaaggctttaaaaattattctctgtttagataatgtagttcagactattgcagggatgaggggtatagagattgttttcattgtaaagagaaggcagaaaaaagagaaggtctgtatataacagagtgtctttctttggttaaatctatgcagagctactaatgaagggaattttaggcatagtatgaaatgaagactctcttgatacttgttttgtcagattctttttgtatttctcttaaatatctactttcccaaactaaaaaatcatcctttgtgtgcttacatattcrgtagggcatctccattgttgtcagcggaggcagtgtggtaggacttcagcaaatatgcagtgtccccctccctcacttgtaaattattctttatcttatatcaccaagtatcagcagtttctctttaatattaagtcattaagagtgagtttaattgaggaaaatatttttactgttattaaatgtagaaatgcagcaacacccaatgcatttggttctaagagatttattagcatttttatttttcatctgggtgctctgtttaaggaataatataacttatttcaaaatatgttagcttgttctggcttttgtttttgttttactcctttggagtcctgagaagacaacatttagattcagaactttctttgttatctcagtgtgtctaatttagctaacttttgaatgtatttcttgactgcacagaaagttggagtgactggtccccctgatccacaagtccgctgtccctctgtcattgagtttgggaagtatgaaattcacacctggtactcctccccatatcctcaagaatactcaaggtatgttttgagagacccttgaccttctgttttgagatccatagaagtctggaactggaagggatcttgaagatgtttgagtccaccttatcctttacatttgaggaaactgggggcttttaaatgtccataatagcagcggctttggcagccacttcatcccagtttgctttagatgttctcttctgtaacctctcagacgctgatgtttaaaatgagaaacccgaatgcatggtcacaataaaaggggaatgcttttttattttttttttaagagaaatttgtcttcactcctatcactaagaattttgaaaaagagaagaactcatatataaattaatataaagtttcagttgattagtctttgatgtaaataaatatttataatttgacaaacttaataaatggtttgttttcccagaaataattggacaattggtgtaaaaattatatataaatagtttgggcttccagatatattaataaacattgatcactcaccagcttggtggagctaaagtggtttcatgactcagctctgaaattggtaagttgtgtaaccttaaaagctgcccaactgctctgtgcctcagtttcctcatctgtaaagcagagatagtaatagtacttacttcgtggggatattgaggacattaaatgagctacaacatgtaaatcacttagaaaatggtaagtgctcaataatgtcagttattatattttttctttatggttaaaattaaaagatgaaatgagatcaaaaaattaaatactagttaattgtagtgacattaatgctctctaatctataaactacttatgcctcagtttcccatttagtagggtgttacaagaaataatrcatcatggtgctttgtgggttaaatacatgttcagaatattctcatcatgtaagttttcacccatgtagtaacattgcctggccaaaatattagcaaaatttatttagtaccttacaatatgttgagtgccttaacatgggttgttgccaagaaactaggaataggccagtatagttgttaaaagggccatccagtaaaacttatttatctttttactttttctttccatataataacttgcttctctagtctacagtcgaagtagaaaaataggggtaagaatgccatttcagacactgacctcaaagtgacagctaacaaaaacagaagaaaaagcaaaaccccaggaaactaacacacaagctcatgaaacacagcaattgagggccatttactgtgggatcagttagccccaaacactgtggtgtawctttaaggaagcacactgtttcatgagctgacaacaattaatgtgactttaagataaggttacattgtatttgcatttccatattatacatatatattatacatgtatgtattgtatatgtatatatgttaaaggaaggcaggaacttcctcaactacctacagaactcagcgttcaagttaactcattcctcaggaattctgaatagccaagatcttttatgaccgagaagaaatacgccaaggacacgcctgtaatcccagcactttgggaggccgagataggcagatcgcctgaggtcaggagttcaagaccagcctggccaacatggcgaaaccctgtctctactaaaaatataaaaattagccaggcgtggtggtgggtgcctgtaatcccagctactcaggaggctgaggtaggagaatcgcttgaacctgggaggcggaggttgcagtgaactgagatcgcgccattgcactctcgcctgggcaacaggagcgaaactccatctcaaaagaaaagaaaataaatatgccaaggaattaattttttcatcaggtttaaaataagttgttatgatcattttttaagtgagctctttgcaagctgcccaaatcacaagagcactcaacttagaaaagaaagcttttccacatgtctgtcaactgttccrgagactatagtacagatagatggaaaccacaggccccttgtctactcaaggtggggagaggaaatagattcaggaatggaaatagagggctagcatttacttttgttcaagagaatgatgagaatggaatcataaactgttttcttttaagatagatatttaaaggatttattgaaaatgtagcttttgttctgatgagattttcattagaaacaggtgtgaggagactagttatcagtgaaagaataaataatgccatcaaaaaataaccaaaaaaagtataataggaaccagtagaaagcagaaacaggataggaacttgtaaaattcatcaacttccttaagcagttttagacattttctgtatattttttcatccattggatagggttctttgagttttcaattagaaaatatcctgtaatttttaataggttcttgagtaattatgactttttttctatctttatattcgtagttctcttggttacatttttwaaaaaaattatatttacttaaatgagcttgaaacttgaggtgactaaaatgtttggagatcttacattttccaaataataaacctctattcttaattttgttaatgcctatttattatttcgtgctaaactgcttataaattattttcttattaaaggtttcaaacactgtaacgtacaaaaacagggcaataggagcaaacaaaaatgcaaagatcacaagaaaaacgtcttttgggaagtgggattatactttacggaatgttctttcatatccagatatttgtgtatgcattgcctattaagtaatcttgtatccctgtctttaaaaatcaaaaacaatgaagcaataatactgtttcatttggtttatcagtaggttcattgcgaaacctactctgccattaagagcatgacatagatgggcttaaggcaaaagaaattatgatcattggatgccctctgctcctgtgctgctttgagcttagctttgagatcctaaagaggtagattcctaggtgatagagtagcctaggaagattcctctgccttttgattctcctctggactttatttgatgcttagattatgagattgtcactagaaccagtttgattattctcgtcatcccagttactgaagaagaaaccaaatagaatccctaatgcctttggctattaaattattgagtaaaattgatggaagaagaatacaaataataatcgttaagtaatagcagctgtaattaccatccattgagcttggtactggactaagcatctctggtgtaattctgtgagatgaatattactgtattcattttgcagacctggtcccagacagtacagtgtataagtggcagaacttgaagctcacttctctcttactgcatagccataaccattaatcactgggcctacgctgctccatgtagcatgtgtatctaggttgatctcacttgacttgtaccataatcttagatttaagtaatatttggtataatttttattgttacattaaaaatttgctacaagttgactgcacaaactgctactatgttgggccatgttcagaagccagaaggtactgtagaaattcctgagaataataattgcatcattctagaagttagagaagcatgcccagctgcagcacagccctgattccatgggctgggttatcagcattgtggcagactttagaatcaacttccagtgtggaggtgacacttcatgtgcagttgatcaaagccaccgtacagctacctgtttgatagctgagacctaggtcctgccaggaagatcactaaaagcagcccccaacaagattctctagggctaggagtattcataatctttataactacatttcatttcctgtagtctcatgttctttctatatgatagatcttttttttctgtgagagaacagcagttgtttataatatttctagaaatattttggttttccagtagttttttttctagatgattccctttagattagcagtatcatcccagtgggcttggttctaataaagtaaggagcttttaaaatgttttcagtgagaactagattggaataaagtagatcataatgcttgttttcagtttactatttttcacataataaggttcactaaagttttgtttttttttttttaatcatcaataaaatgccatacatcttgccattctaaggaagtggcatgaactcttcatttactggagaagacttgatagtaattttctcagagattttatttctcctgatgttttcttgagcaatttggttactgtaagagctttaaacatttttggccttctctcacagatcttaggaaataaattgtagtttattttcctcccttcctccctcccttcctctctcccctctcccttctgtttccagaaaagtaattagcatttattgaatattttcgattttttaattgacagataaaattgtatatatttatcatgtacaacatgatgttttgaaatatacacattatgaaatatgactaaatctagctaacataaatggtactttattttcatgtctctgtgctgagacctaacagttggattggatgcccttaaagttggcatttatctttaccataatttggaaagcttcatggtctgtcactgttttttactctatcatttttacaaaaatactttaaaaagcacaaaattttttaggtttctctgattcgtattataggaagtatttagttgtaatatttagctctcaaaatgaaactgtactcagatagtgttacttctgtatcttcatgctgtgacaagttaagattgctcactgagaatttagcacatgtaagaggtaagtaaaacagttagggagggaggtgccacccgttgtatctacataaggagactcattcttcctcttcctttgaagaagaaattactcagaatccaggtattcaggaaggtggtctggcagttgtaggtcacctgtaaggcttagttaatacatttagtgctcatattagatgatgaagtttataacaagccatttcattctgtgatttgtagctgtggtggtgaagaaggaaaaacctctttatctagtggttcctcttgaatagtggggcttgaggcagaatgcagtggaaacaaagtagccaacaacacactgctttccatgctcttagctcctgcttcttgactctaatttatagtgccagtcattatttgtttcacttagtgcttgattttggaagggttgtactaataatataattacaagttgtattggtgtggctaacatgagagattttgaaaaacaatattgtataccatagatgtttagtaatagtatactacaaaagttccttggaaactttcagtgtgctgaattgaatgacagtttaaaaaataagatgtgaggttatatgggaagaattaatgcacattgtgagtcccccaggaaagttgggaaaaagcatgtgccctcttgcccttatttgagcacgaaatccttagtacctgcaggatttgtgttccataaatataccttgggaaaagctttagtagaattttagatgttctcagataaattatatttcaaaagctgctttcaaaatgggaacttgaaaaaatggttatggtcttcacacaaatcaaacatttttgtgtgtgttaatctacttagcaaatattattttctttaattctaggatagtattttaagcataactatccaaattgatagcaactaaattaattttttcatctcagtacttaaatatgagacaagatacagtaatttatttgaattatatattttgtcattttaccgtccagtatttttgcatatgcagttttttttttaacctgttacctgggtagtaatgagaggcaaaaagatgataattgtggaagtttgaagtactctaaaatataaagccctgtcttttttgtttaattaycrtttacaggctgcccaaattgtatctttgtgaattttgtctaaaatatatgaaaagtagaactattctgcagcagcacatgaagaaatgtggttggttccatcctcctgccaatgagatttacagaaagaataatatttctgtctttgaggtaaggtagatacttagtaattgtcctctcatccatttcataagtagggccacctatattgcatctattgtgcaactttctattgtctattttatgtatcactaaaatggaaaaagtactaattataatttttaaaacttcatttgattataaaatgccagttgattttgcatatattaagatgtgataaaagtacatcttagaatctatgaaatayggcatttaaatgaaaggatttctatcacttatttaaaaggaatatctcacagagatctgtttaatagtaaatcttgatgatgatgatgatgatgatgatgatgtgtgacctctgctctgtgattctctattgctgttagtagcgctcttgatcctcagttctgtggttttcgtgccaagtattaattgagtacttgcttatgtgccgttacttactgtaacagtaaaatttcagattgtcaggatcccctcagtctctcacttttcttggtcctccctaagactcttttaagtgatcagtagaggagttctttaccttgggagaagctggggtaggtgtggtatatactgtttgaagagaatattaaactacctgggttgttgaggagttctgttagtatcgcagacagtgtcttgggagctaatgtgggcatccattggygttttgatagaaagctctggcaactccatgaacacagacaaggctgccaggagcaaaagagcagcagagtgctcctgggcctggccaacctggagcctcatttaccacatgattgcttgaggaacccgcttggtgcttctgcgtggcaatagttagtacccccttaagtagttttatctgggttcaagcccgatcatggtagtcagattgcattgcttcaggcagctggcatagattagactacatagttacatcttcttttacctaataaatgtattttagaagggttgtatttagatcttttgttgtgttaagtactttgaaaacgaaacttgctatctaaaggattgctacaattcatctttttattaaagcaaaaattgctcttttaaaaccagattatcacttccttatctggctgttcctgctatgttgaaggtatgaggttttatatatttggttgtcttaaaacagcagatagcataatactgccatttcaaaggatggcttccaggttccaaagtgttctggtcatggacaccttctcctagtctggactgtggatatctagagatgcttttaactgatacatattattctagaactaaagagaccctctactgactgttttgttctgtttatttctctaggttgatgggaatgtgagtaccatttattgtcaaaacctgtgtcttttggcaaagttgtttcttgaccacaaaaccctctattacgatgtggagccatttcttttttatgtactaacacagaatgatgtcaagggctgccaccttgttggctacttttctaaggtaagtatgtcagcttaaartttgtttgaactcatatagaaatctgaaagaatctttgctggttctcactcggggacacaacaagatgcagcacckcctaggtgtcatctagctgtttggaaagaatagaaggaacatttggaaacttaccaggtgctagaaggtgcttagtaacattcaacaacctatattctcctaggattatggactgctggcaatactcacggggaaggttttaaatggcttctcttcccatggtaataacatggaacttctgaaataaacagtcattagctctctgagttctgtctcagcttcaatcttctcttccttatttgaactttaggcatagaaataagagtaagaaggcattttggttaaaggatattttctccttttttaatcttccattcccttagagggagaaagtttatttctagtcagagaacataaaagatatacttttatttaagcaagcctgtggtaaaatccaagtgtataaaacagttaggggaagtactagctttttataagcatttataagaattctttaggctacttcattagttagatgtgacttaaaatatattcactcatttataaaattataaaagtgactattttgtgtaaagttagatacaactaataggactgctctgaggagcaccagagcaggagagaaagaaaactctgacataattaatgagtcttctcacttctagagtggcacactgattcatcatttgtagctttacggattgtttgggactcagattccggtgctgatccttargcattggcgtactgtgtttgagttgcagatggtgttggatggcattgttttgttatatatttttactctcctgggatggttgctttgtgggtaatggcagtgacttgacattatcctatcttctcccagctgggtagttgtttgttgatgtacgttgctattcccaaaggaccagggctgtgggttttggccattagtctttgtttcttaattcacgttattattcacttttaccagcctgttttcaaacttgacttgtgttttctccaccaggaaaagcactgccaacagaagtacaatgtttcctgtataatgattcttcctcaataccagcgtaagggctatggcaggtttctcatcgatttcagtaaggattatattaatttctcattggtcttttccagtggaccttctctgtgtgtgtgtgdrkgtgtgtgtgtgtgtgtgtgtgtgtgtgtgtgtgtrtatatatatatttaaagatttgtaggtgctttgttggctgctagtatcttttgtcatatagctatatgattctttaaaacctaaagccactgctggacactgtggctcatacctctaatcccagcactttgggaaactggggtgggaggattgcttgagcccagtagttcaagaccagcttaggcaacatggcaagaccctgtctctacaaaaaatttaaaaagttaggtgggcatgatggcatgtacctagggttccacctactcaggaagcagaggtgagaggatcacttgagtgcccaggaggttgaagctgcagtgagcaatgctacccctgcattgcaggccctagcctgggccacagagcaagactctgtctcaaaataaaaatggaaataaataaaacctaaagccacacgttccttttattttggttggacacgaatttttttttttttttttgagagacagagtctcgctctgtcacccaggctggagtgcagtggcgtgatctcggctcactgcaagctctgcctcctgggttcaggctattcttctgcctcagcctcccgagtagctgggactacaggcaccagccaccacaacccggctaatttttttgtatttttactagagatggggttttaccgtgttagccaggatggtctcgatctcctgacctcgtgatccacccgccttggcctcccaaagtactgggattacaggcgtgagccaccatgcgtggccttggacacaaaatatttttaaacagctaatattgaataaaattttgtgtgatgtgtagcacatacctttaatttcctattgttcatttacaatggaactcagtttcatgcagtaatactaataatactaaaaacattgtataactacttcaattagagctaataaggaagtactgtgggccgggtgtggtggctcactcctgtaatcccaacactttgggaggccaaagtgggcagatcatgaggtcgggagtttgagaccagcctgcccaacatggtgaaacctcgtctctactaaaaatacaaaaaattagctgggtgtggtggtgggcgcctgtaatcccagctacttgggaggctgaggcagaagaattgcttgaacccgggaggtggaggtttcagtgagccaagatcacgccactgcactctagcctgggtgacgagcaaaactccatctcaaaaaaaaaaaaaaaagtactatacctgccgtatttttgttatccagttatctgagaaaatgtgtgcattttttttagttaggctctacctagtggttaaacatctgcaacacatctttaaatatctgaagaagtgaatgatagagaaaattgtttaatctgagttcaaaagtgatagctcacagttctaaagagatcattgtgggatctgtgtaatttgagggaatattttacctcagatattgctatacaatgatatttagatgaatatatgcagaactaatggttcaaacaaaggattttgattctagtcttgagatgttaattaagccttctcttagctttagactgtccttctgtccatattttattggaagcttgtgctactggttgttttacacattttctggtctttttagatgagcagtaggggatggaactcagattacttcctttaatgttaatatattgttttgaaataggactcatgattagacatgttatatatgccattaaattgcaaagttagggaaaatattttacttttggtgattgggggtgtgtgtgtatggtatacaaacagtccgtgcaataacagtattgtttgtatttacttttcytaatgtaatacgtttccaaattaacattcttagactgcttttatgttttctttaatgacagtaaaaatacctttctctgccatctccattttcgttgcttttccttagaagttaggcctttgtttttcagttcttgagagttgtgcactatagaggacagagtccacagttccacacttatattggcagtcctgcttgcctagagttagaatgataggtaattgtgaggagttttggttgaagtgaaagattgtcatctaattcactgacagaactacaattttaataggattatgtgaaaatgaaggcattcttttgtacttctcagttcagatacagcagttgccatctagtggtccaaataaagcatgcaaggcttgttttccccaggacgttgaacgaaactgttaacagtcctgatttttaacacttcgaatattttaacaaggtgattgatattaactgtagacataataatactaacttagtcttcaatatatataaattatgtattctttctgcagatttgttttgaagtagttttgcaatttgtttctctctttttttttttggaaggaatttacctttggagttattcttggttgtagaagaggggattgttattttggtgaatccagtttttcagagttgctgacctagttctgatttgagttatttgtgattctttaggttatttgttatcaaagcgtgaaggccaagcagggtctccagagaaaccgttatctgatctgggtcgtctttcctacatggcatattggaaaagtgtaatattggagtgcctttatcaccaaaatgacaagcagatcagcattaagaagttaagcaagttgactggaatctgccctcaagacatcacttccacactccaccacctacgaatgctggacttccgtagtgaccagtgagtatcacatctttttgtatacctttgaaagataattaggttgaagttttttggatcagccagtcagattattgatgaaagggcattaactaatataaatgatatacttggtgataatgagatatcattttcctttctaggatattttatttgattgactatatatatggtctatatatagtctatatatatgctttttaaactgaattgtttttctgatacccctaatttttggacctaagctactgaatctttcatcttctagtattgggagctctttcacaatacaagaagtaaccactctagaaacagtcattaaataaaatgcccatgttaaattttcatataaatggcacaaagtaaatatagattgaaaggaagaacagacagttcacccttcactaaagtggtcagaaaaaggtcacaaagaaaggaggcatttgagccaaataaatggagaataggaaagagagtgcagaagagcagcagaacttctggagcgggacgtgtgagacagcaggcagtgaaaacagcccgcggccacggtagagagcgaagcatttgtcctgcttcacactcctggccgtctcatgtggtggcacatttctgcattccatcgtcccaggcaggctatctttgcagcacctatcatcttacatgcttcaccaggggtctcatctccacattcatttttatgtacaccttgtacattgttgattgctataaacttttctctggttccagatttgtgattatccgccgggaaaaacttatccaggatcacatggcaaagcttcagctgaatttgcgacctgtagatgtagatccagaatgtttgcgctggactccagtcatagtgtccaactctgtggtctcagaggaggaagaagaggaggctgaggaaggagaaaacgaagagccacagtgccaggaaagagaattagagatcagtgtaagggcatgaatagtctctatttttgatgacagaagatatatttttgatttcatgagtatttataataatgtattatgatcatctttcacagaaaagtaaattcacattagaatgtcaagagttttatttcagtggtagagatttcaagaagactggacctggtttacttaagtatttttaagccttggacaattaggaggagaccatcaaatttcttataatgtgttacttgtgagaaaaatatttgttaccagggtgccaagaagcagctcagttttaagctggatagtagttgagaaatctgaattgaatccaaatctgacagtttttaaaaatgaaatggaggttgggtgtggtgtttcatgcctgtaatctcagcgctttaggaggcccaggcgggaggattgcttgagaytaggagttcaggacaaccagggaaatatagtgagaccccatctctacaaaaaaaacccaacaacaaaatgaaatggagatacattttccttaaatagaatattaagtaactattgtaaacttgtgtatgttttctgatggggcaccaaaacatcctgtggacacacagatctctttagccgttaaagggttgctggtgaactgtagtgcatgtgtcattgtcagtatttttcttcatgtgatgcatacttttatagctcttttttttaagcagtgcttcatcctttcaacaccggtatcctcctttaataaacataaaaaatcccatgcctctctttagtgcagtttaatttttcaaaatgaaattattcagaataaaagtaaatttaaaaactacataaactttctttcatatttctcaaatgcctccttcctcttgcccatgtctcaagatcctgtctcctccaccctgtttacaaatttttatttctgagaaattttattaaacaatctcatttaacatttaaaagaacaatagtattcactttgcttattgagggtggtactgcagaaagattcagaacataggctctggagtcagactgccaggcttyctatcccagcatcttctcttgctcttgcgtgacctggggcagattacttaaatttttttctaccccacatgcctcatttgtaaagtggagttgtagtggtaatacttcatatgattgttggggagattaaataaataatgcatatacagaatttaaagcagtgctgaaacaggaaatatccatgttaaataactgatcattttctttttaaagctcagtttccttttcttctctcaatacttaaaaggtcagaataggtaaatgtaagcaaacaagactgaaaaattaaccagcattgttttattttctaaaatcaggtgggaaagtctgtgtctcatgagaacaaagaacaagattcttattcagtagaaagtgaaaagaaaccagaagttatggctccagtcagttctacacgtttgagcaaacaagtccttcctcatgatagtcttcctgcaaatagccagccatctcggaggggccgctgggggaggaagaacagaaaaacccaggaacgttttggtgataaagattctaaactgctcttggaagagacgtcttcagctcctcaggaacartatggagaatgtggggagaaatcagaagccacccaggaacaatacactgaaagtgaagaacagctggtggcttctgaggagcagccaagccaggacgggaaacctgaccttcccaagagaagactcagtgagggggttgagccctggcgaggacagctcaagaaaagccctgaggctctgaagtgcagattaacagaaggaagtgagaggctgccmcgtcgctacagtgagggtgacagggctgtcctcaggggcttcagtgagagcagcgaggaggaggaggagccrgaaagccctcggtcaagctcgccaccaattctcacaaagcccacgctgaagcgaaaggtaacgcatttctttccaggtcttctcttyctccaattccagtttatcttacaccttctcgttttagcttacagttctgaaagagtataagttagaaattcctagtgcattgctttataaaccttaagcctctgtatattgtagctcaagatcttccmagtgaacatttgagatgtgtgtgtgtgtttgacttctttgattcatgggaattcacttagaaatcataagcttatttaagggcttcacctcctgggatgcaaacaaacttttttttagcttactggtttgatgttcaaatcatgacttttaggggcttaaagccctaaaatatctttaaaagatatttttaaagtatgtacagattagaagtgtttatattagaaaaggaggccaaaatattacataattaattggaaagtgaacatagtgctgccctatattttggggtactcagagtmcagtagctcatcttgggtgctattgttttctctctactctccccacttctcacacatccctccagtggtttaacgtggtctctcttgctttaaaaatattttctaaactatattccatcataatgatagccaattagttattaaataatgtacaatgatgataatgaattctgttaagccgtttaccagaaacatcccaggctatggagtggattttaagcattgccaggaggcagccagactgaagcgaggctgctccctggaagagccactcagccagcttccagccaaagcagcacaatcgttcctttccttacagggtcttaaaaagcaagacaggatcttttgttttgttttgttttgttttaagaataatatcttcagagcagttttacatttacagaattaatgcaaagaaagtacagagagttctcgcataccccagccagtttcctctattattaatcccttgcgttggtgtggtacatctatcacagttactgaaccagtgtagatacatcagtaactagagttcatactttattcagatttccatagttttccctaacgtcctttttctrttccaggatcccacccagcatatcgcattacatttagtagtcatgtgtctttaggttcctcttggctgtggtagtttctcagaatttccttagtttcgatggccttcatagttttgagaatgactggtcaggtattttgtagatgatccctcatgatattagaatggggtaatatattcttgagaggaagaccatagaggtaaagtgccattctcatcacataattaaagggtacctgttggcatatatctatcagtatgtatagggaagctgggcatagtggtcactcttgtaatcctakctacttgggaggctgaggcgggaggatcacttgagctggaggctgtagtgcacaatgattgtacctgtaaatagccactgtagtccaacctgcgtgacatagcaagactccgtctgtaaaaataaaaagaagcaagtatcaaatataagggtattatcaatttgatttttccctattgaagttaactttgatgacctggcttaagatattgtttgtcaggtttctacttttcttttccctttactggaaggaagtcactgtgcatagccacacttaagatttctaccccctcagagtggaggctcagcataaattatttgaatttctgcttgggagatttgtcctttctccctcatctgtttatttatccaagcatttatttatatcattattggcccagatatttacgtgatacttcactttataatccaatactactgctttttaaaatttgttgctcagattgttccagttttgaccattagaagctccttcttttagtttccctcttgggctgctgctgctttttttttttttttttttttttccttccccagatggggtcttactctgtcacctaggctggagtgcagcggcatgatctcagctcactgcaacctccacctcctgggatgcaagcaacgctcccacctcagcctcttgaataacttggactacaggcatgttccatcacgcctggctaattttttgtacttttgatagagacagggtttcgctatgttgctcaggctggtcttgaactcctgagcttgggcggtccacctgccttggcctccaaggtgctgggattacaggtgtgagccaccgcgcctggcctcctgtgtttaacatatatactgttgttgtcattgtggggtctttttgtttgtttttaagcatttcctttctggcactacaagatgcttcaagttcatcttgtatatttcatgcccttgtcctagaatcagccttttctccaaggaccagggccatttttaatctaatttgaaaattacattctcgattgggactattaagtttgaagtagagaaaaattgaacattgactaactgctgttcattgcatgatcatgaagaatagatctttgtcatcctagcacttgtattgccaatttatgaagtaaaacaaatcatgttaaaaaaagaaaaagaacaggcagtaagctcacatgcaaagtaattttgaagttaatgaataaatgctttgactggatgtgtgaacttaagcaagtcctataccctctctgacatctatagaatgaagggattggattagataatctctggggcatcatctcttattttgtgatattagttgtataattttagctatttggtcagtccagtgcaaagttgtgctcagtgtgcccaaatttcagtaacagatttattttacttttgaaatatttcactaacactgagtaaatacatttcagccccatatttctacattccacagctttttatgagtagttcatgaaaatggcatacaactttactgatagttctgcaaaccttcacagtagtgctataagacaaagtgtttttatttctcttttgctcttaagttggaaaagttaagggattagcctctgggtcagttcagtattaaaacagggcaactctctagggtgctaaatttaactgaactattaagagaattataatgtctgctatttggagatggctgcctattcttttacaaagttgtgttcaattgcctaatacctttgtatttataataagtgtattatcttactatagtattttgaaataatattcaaaatattttttggcaaacaacatcctcattttatatgtgctaattctatttggttttaaaactgttttcrtattattaatagaaaagatagtgttcataactgtaaatacttgctttctctattaaacagaaaccatttctccaccgaaggaggagagtccgaaagcgcaaacaccacaatagcagtgtagtcacagaaactatttctgagaccactgaagtgttagatgaaccttttgaagattctgactccgagaggccaatgccaagattagaacccacrtttgagatcgatgaagaagaggaggaagaggatgaaaatgaacttttccctagagaatacttccgtcgtttgtcttcgcaggatgtactcaggtgtcagtcctcttctaagaggaagtctaaagatgaagaagaagatgaagagtcagatgatgctgatggtatgttttacagaactcacttactgtggtttattgtcttcagatatatagcagtagcagtgacagacccttcagtaaaaaggctgaaaaatgaacacaacccactaagcaagaaaaggaacgtttggcaatctctaaaaagttgtatcaagtatatccatcttgatttttaaatgtgttttcccttcaactcagaacctctattaatttgcctctgcagaaaatatcttactattaggcaactgttcttttttgcccaatcctttctaagcctttatcagaatctttagttaatgggagagttggacttagcatcaggaagatgtaataacccttcactagaatgtgcattctctagacttagtctgttttgctcattgctgtatgctgagtgcttaagcccggcgctcagtaagtagtgttaaatgagtgaatgctaagaagacaattctccagaaagagcagattcatgtaaattggaacttgtgtcacatctgttcaggagtctttcctgaattgtatctctaatgtgtcttacccaactagtagtaaatttctcacaaatggtaacaataactcaaaataaattttatagtatagatacaaatccaactatttacttttaaagcagcctagttgtcatttcttctctagagacactgaaactaggkctcatatatatgagccaggtcagaaacaagtctttttcaccctagcctaaagttttgccagtgtctcatgctgcctgcatctgcagtgtgtttatctcgcatgggctcagaatgagcatttttactttgttgggcaaatttgaagaaatctacttgtccagtcttggtacataaacctttagcttttatgcattaactggttgaactttttaattcttttaaaaattcagtcagtttcaagtctagaagataaacttacattttctccattctcatattttctatataacaaatacttttttattttttattttttatttttttgagatggagtctccctctgtcacccaggtgggagtgcagtggcacagtctcagctcactgcaacctccacctccgggttcaagcgattctcgtgcctcagcatcccaagtagttgggattataggtgcacgccaccatgyctggctaatttttgtatttttagtagagacggggtttcaccatgttggccaggctggtctcaaactcctgacctcaagtgatccacccgccttggactcccaaagtgctgggattacaggtgtgagccaccctgcctggccaacaaatacttttaatatagtgataagatgaatgtgttctttgctctatcatgaatgattctacagagtttaacttgctatgttttgaaataacataactaggaaactaaaaatttattttgtaaatttagcactttatattctgtcttagatcattgtacactaaaatagtacccctgattaagttcccatggacttagatttttgctgatgcagccatttcctttgttgactttcaagttactactactaactgtgcctttttagccgtgcccccactgcatcatgttcttgtcttggtattcttattctttaaaaattaataggcaatgtgagtgtacttaatgccactgaacttaacacttataaatggttaaaattttaagttttatgttacgtatagtttaccatagtttttttaaaatgctaataatataaaatttatttctaatgaatgtaattggtgctttaattttttcttgtttgtctaagtctaaatgtcagtttttgtctaggactaaataaatgctttgcagctattcccatacaaacacaacattaattgaacaactgttcacatacgatggctcagtcatggcctagagtaattggctcatcatactacctgaagtgatgatttgtggaaagtaagaaaatccgagagataaagtaaatcacaagcagaaaaaaaaagaggaaataagctaatttgtaacttttagtagagacaacttgataaaagtactgcttactacttatttgcctctttataaagttcatctccattttacagatgatgaaactgaaatgtagagtaacttcccacagacatgcagctgatgatggtagtcttgaattggttctgactagtgtctgataacataatgttgaccaggattctttcatagttctgccaattcactgtgtgacttagaatatgtcactaattagttttatcctctaggttcttaactttaaaatgaagacaatcaggagtttataaaagtaatgattaataaagtcatttctattgtatatgctagtcttggaagaaggaactagaaaatgtaagaccttgtaacctgtctttgttttttttccttcctgtatagacactcctatcttaaagccagtatctcttttgcgaaaacgtgatgtgaagaattctcctcttgagccagatacatccacacctttgaaaaagaaaaagggatggcccaaaggcaagagccgcaaaccaatccactggaagaaaagacctggtcgaaaaccaggatttaagttgagtcgggaaatcatgccagtttctactcaagcatgcgtcattgagcccatcrtttccattcctaaagctggacgtaaacccaagatccaggagagtgaagaaactgttgagccaaaagaagacatgcccctacccgaggagaggaaggaggaggaggagatgcaagcagaggcagaagaggctgaagagggtgaggaagaggatgcagccagcagtgaagtcccagcagcctctccagcagacagcagcaatagtcctgagaccgaaaccaaggagcctgaggtggaggaggaagaagagaagccccgtgtctcagaggagcagaggcagtcagaggaggagcagcaggaattagaggagccagagccagaggaggaggaagatgcagctgcagagactgcccagaatgacgaccacgacgctgatgatgaggatgatggccacctggagtccacaaagaaaaaggagctagaggaacagcccacgagggaagatgtcaaggaggagcctggtgttcaagagtcttttttagatgctaatatgcagaagagtagggaaaagataaaggataaagaggaaaccgagctggattccgaagaggagcagccttcccatgacacgtcygtggtgtcagagcagatggctgggtctgaggacgaccacgaagaagactcccacactaaggaagagttaatcgaattaaaagaggaggaagagattcctcatagtgagctggatctggaaactgtacaggcagtgcagtctttgactcaagaagaaagcagygagcatgagggcgcctaccaggactgtgaggaaactcttgcggcgtgtcagaccctgcagagttacacccaggctgacgaggaccctcagatgtccatggttgaagactgtcatgcgtcagaacataatagccctatctcctcygttcagtctcaccccagccagtcagtccgttcggtcagcagtcccaacgtgcctgcccttgagagtggctacacccagatcagcccagaacaaggatccctgtccgcaccctctatgcagaacatggagaccagccccatgatggatgtgccttccgtatcagaccactctcagcaggtggtggacagcggcttcagtgacctgggcagcattgagagcaccactgaaaactatgagaacccaagcagttacgactccacgatgggcggcagcatctgtgggaacagctcttcccagagcagctgctcctacggtgggctgtcgtcctccagcagcctcacccagagcagctgtgtggtcactcagcagatggccagcatgggcagcagctgcagcatgatgcagcagagcagcgtscagcctgctgccaactgcagcatcaagtcacctcagagctgygtggtggagaggcctcccagtaaccagcagcagcagccgccaccaccgcctccacagcagccacagccgccgccgccacaaccacaaccagcaccacagcctccaccaccccagcagcagccgcaacagcagccgcagcctcagccccagcagcctccacccccaccccctccccagcagcagcccccgctgtcacagtgtagtatgaataacagtttcaccccagctcctatgatcatggagataccagaatctggaagcactgggaacataagtatctatgagaggattccaggggattttggtgccggcagctactctcaaccatcagccaccttcagcctagccaagctgcagcagctgaccaacaccattatggaccctcatgccatgccttatagccattctcctgctgtgacttcctatgcaaccagtgtttctctgtccaatacaggactggctcarctggctccatctcatcccttagctgggactcctcaagcacaagccaccatgacgccacccccaaacttggcatccactaccatgaacctcacatctcctctgcttcagtgcaacatgtctgccaccaacattggcattcctcacacgcagagattgcaagggcaaatgccagtgaaggggcacatttccatccgctccaagtctgcgccactgccctctgcggctgctcaccagcagcagctgtatggccgtagcccatcggcagttgccatgcaggctggccctcgcgcactggctgttcagcgtggcatgaacatgggggttaatctgatgcctactcccgcctataatgtcaattccatgaatatgaacaccttgaatgccatgaacagctatcgaatgacacagcccatgatgaacagcagttaccatagtaaccctgcctacatgaaccagacagcacagtatcctatgcagatgcagatgggaatgatggggagccaggcctatacccagcagcctatgcagcctaaccctcatgggaacatgatgtacacaggcccctcccatcacagctacatgaacgctgctggcgtgcccaagcagtcactcaacggaccttacatgagaagatgagcaagatgaacttgcaatcaaaaacttaaatatatataaataaaggaaccttttatactgacaaaccagagaaaaatggacctttttccagttaaaatattgctgtagatttagaggaatttttctttggtttattttattttttagaaaacctgatcttctctttttttgggttcattttgttstgggttttggttttcttcacaatcttgaacattttacagtagaactcatctaaaaatggatttggggatggggaaacatgcacaaaatcttttcataattaaaaagagccttactttctttacataccacatggacagaatttgtgtaaaagtgaattatctttattttaaaatgtatgtttcccctcactgtttgcagctcccaatgttgtcatttttaaatgttatatacatctcaagggttaaccagaccctttcctccaaacccaacctttcatttcctacttcattccagcaggaggcacttaggggagactcggatggggacatggagaacaacccaagctccttaaacttattattattgttaatattattattattattattaataaagtgaggcaggaaaatgcttctccttttaaaatcccctccactcctcacacacacacacctcttgaaacccttccccaagaatgtttctttatagacggacttcattgaaatctttgttgttcttgaatcaagtgtaatataatttttttcttcttttttaaaatattcccactcagcactcagagacacaaaaatactgtaagtctcaattaacagcagaatctcagagaaaagctgtttgcaatccaaatccagcctttggaggaatagagatggtcaattaacaatcaaaaagaggagattaacctcttgtttttttaccacctggtgaatcagccataacgcacacacacgccacccagcctcttgtttctagtatgtactttgaaatgctaactgagggtcttgatgcttgagcctttgactgataaaactcaaatagcagtccccagtgatttgcctcttaggttctttcttaaattgttggtggatgactgtacattttagtgatttgaaaaataactgacaaaccattgaaacagtttattttatgttggaagagatggcgcagatgtgtgtcagaagggagatcacggtgtgagtttcgtagctatttaagtgatacatacctctagtttttgtatgtcttttgagatcctgagttcatcccctgwgaatcagagtgcacaagcacctctcctgtgagtggctaatgagaagagggacagaccgaccaccagcacagtagggcagatctggacagcagaatgttataacgcaagttcatgtgttgctcccaactccattctctttttttttgtgcaaccagattgcccattctcttcctattacttgctccagggataggtaaaaaaaaaaaaaaaaaaaaaaaaatatatatatatatatatatatacacacacacacacacacacacacacatatatatatatatatattccatcattagaagatggaaactattataccacttggtatgtgcagtcaaatatccaaaagggggaagtactgcttagagaaatatctgtaagcattaaattctctcctttatttgtacattttatatagataaatttttaaagtactaattaggcattaacttttttcaaatgcacaggtttgttggtttttttaatacactttaattgactttctcaagcgtgctaggtagaaacgcagaattccacatcttcccgctctcagctctgagcatgtgcaaggctgtgtaggacccagtttctctgtatatactattccagttcccagtcatctatgtagaaagtgcactgtgctgccatcgccctacatcttcagctgtgtcattgcttcctggttggggtggggacggggtgggtcgggagggaggtatattgggaggagggtgggtcaaggcagaaggagaagctgttgaaatgagggccgtgaaatcagtttctgttggtttgcggttgtgtttggttttgtttgtttctttataaaaaattcaatcgggcagctcccttttccacaagcctctttgtgactgtagaactattgtagaaaaaaaaagttcttttctatattataaaagaaattatccaacacagtaatattggtacctgtcattttttcacttctgtttaaaaaaaatgtatttttagcaagataacttgggtaatcttctaaaaaagaaatttaaaaactcactgttagtgactttgatgccttttaaaataagagctttttcatttcattccatctttaaaattttttatctttgttgtagaatattaaaaactattttaagaaagataaattctctttaaagagatctctagcgtgtgtgaayagagctccagatgcctctaaaagccgcatgtacaaaggaagccacgtctatcctgtctgtttatatttgcttttcctgttttgtaacctctttgtactttgttcatggtgacttgtaagctaaggggaaggggtgcctagatgcctttgtatctctccatgtcacgcgctcctgggccagccggcctcccttcctctccttgtatgtaatacctttttttcccctttctagcaagtactttcaaaagaactctgtacattttaacataaaaaataaattatgttgagccattttggatgtctgtcttgcatgtggaatttttctcccttcccagtatgtcagaactcttcaattcttgttctacacccagagacctataaacattagtcttttcattttcctctttattataggagtacaagtccatggcctttgctttgaaattccagttttcatttatgtctgtgtttaaatgccaacaatatggatgggttttccatttccaaggaacatggcacggtaaccctactttggattttgtaggggcattcatataaaaacctcctaaagggattttaattcccgtcccccccactcccctaaaaaaaagcaattgcaataacaagtagctcctagacttgtgataaatgggaggagtaatttttatagatcttattttataatgtaacagtatttttaaaagcgttgtgggttttttttcatttcattttacctaattgggtaatctaggaagattcgtcattctccttttgccagaattcaaggccctgaatgctgattactttttggtggtctcttgggttgtgtttgcctctcatcatttagaattgtggacaggaggcagagtccagaaaatttgatttcactttgggaaattggccttagtttctggtggtaggcagtgaggcaggttcaagttttagcggcctccacacttcctctgccccttcacactgaggaattgaggaactgtacatgatactacctatagcagacatttgttctgaatttcatgctgtttaaagtttagacagtatagtcatgtcatctcaaaaggaatgatgtatgtccgttgatttcttggctggcttatataaccattatttggacacaggctgtgtcactgtgctatgcaattactagtggattgtcttgaaaacattcttgcctttgccactgaagagtatttgctttaagtgatttcaacataaaccaattatgttttttcaatataagagataatgtggccaaagactattctagactttcaaaaaacatacataaatatatttatattgcatttaagtataatttgaattatataatcccatgtatagccaaggaacaaatgagttgttcggagtaggggaggtgctcctatttctttgttgtctctccacctcctgctgacagtagattggggaggatgacacactcaatgtgtgtgatactgagaaccctagtccaccaacctgtcgtcgaactttcagaaactagagcaccaggaatcacattcttttaaagcctttctgggcactttaggtggtgcctggcttcctttgtagcatggtgacacctgtatgaactccctaaacaccagtcttggcagcctcacagttccagctctttaggtgaaaattattatttcagattatccaaatcacagctcaggcagtgtggtgattttcgtcatattccttcctctagtcttttcataatgtacaagatgtgggtcaatggtgatggtaattgaaaggaatagtgaaagaaacaaaaaatgctatctttggcagaacagagtatgcaggatccttatgatgagtggtgggggaaaggagctctacttattgatgtgatattcaagaaacctaaaaattcaaatgaatgattcctgtaaactcaaaatatcatttagagtaacatttttagtgttgacaagtgtctggaattctttttttttttttttttttttgagatggagtctcgctcttgtcgcccaggctggagtgcagtggcacgatcttggctcactgcaagctccgcctctcggatttatgccattctgcctcagcctcccgagtagctgggactacaggcgcccgccgccaggcccggctaattttttgtgtttttagtagaggcgggatttcaccatgttagccaggatggtctcaatctcctgaccttgtaattgcctgcctcggcctcccaaagtgctaggattacaggcatgagccaccatgcctggccatgtctggaattcttgagcatggtcatccaagtaaaagcctacagtccccagaacaaaacccaacccatttttgttaaaaagtttctgttagtgggcaggatgggtttgttaggtaaattggtgtggttacgtaacacaacttagacccatagattttctttccagagtgacagctacagattgggcttcatggagatttttagctatgttagtaaggagcctacatactggtataccaattgcataaggcctcaaaaaggtggcagctgtcatttttgcctaaaataaggaaagcctgggatatgatggactttggtttttgaggtcttttaaggccctggacagagatagtcatagggaatgttttcctgtggctattatgaacaaattttgtgagtgtgaaatacacattcttgttatttcaaggaaaaaatgttctaacatttaactttttactaaatagacatttctgaaagtcacatttaagccatttcaaaaaagaagtagtgaatgtgttctctgggatggtgagttcatttttaactgttcttaatttatacatgcacaaagatgagccagcaaggtaaacatgatgaactgaggtcagctgttgcctgtgcttcaagtgcacaccaacatttcactttagagctggtgcatttaattggaatttctattaatatgcattgaaaaatggacatctgcttaatgttggaagacatgagccattcaaatcatctctcattaaaattggccttaaagagctttttgagccccagaatcttaatattttaaaagttttatataaaacctttaaattggtattctaagtgtaaagtctgttgtgaacaaagtaaaaacattcatacacaatttccttgctaggactgaggctctgtcccatgtacaagcaagtttcactggtttaattgatttgttacatttagtaaaattgcttgatttaatttttttctttttttctttttttttttcttgagctagtctgactctgtcacctaggctggagtgcagtggcactatcacagctcactgcagccttgacctcgtgggctcaagtgatcctcccacctcagcctttccaaatgctatagttttctttgtaaatgaaggttaataaagcagttgtagtcaattacatcaaaatgattgaatttgatcatagttttccaaagaaaatgaaaacattgacaaagagacagtgattaaggctttactaataaaggcaaggacttcttgcaaatgggataattacatgatttcaaagaagtttgtcttacctcctgtttagagaaaacagctaaaattaactagaactaacctgacattctcaaaggatgattgaaagctgtaaatctgaaagctgaataatatgtattattgcaagaacaactttaaaaggtcagggaagtagttcaattaaaagaacagaggaatacaaagcaaagcagactcaagccagctactgccactcacctttgctgagtctcagcacagggatctcaggttgcagtgctgctgctatcaggcaactccccgctccgtggggtctgccttgctgccagcggactgccatctaaactgctttcctctgcagcctcaggtgtcacacgaagacatgaaaatgcccatgcaataagatggacttggttcccttacatcttttttaaaccccttgttattgtgaaaataaagcacatacagaaaagtcaataaaacacatatagctgaatgcatttgtctaaagtgaatacctctctaaaaataaatcaggctgcaaaatagaactgcagctcagtagtccctccactgtggcttggagggcccttcctaagcacagtctaccctcccaagcggaaatgatcaccatccaggcttaggcggtaaatctttttcttgtatcttactacctaggtgtgcattcttaagcatcatagcttcactctatcttgttttgaagcttacagaaatggaatcatacagtttgcatctggcttccctcaacatgttcgtgagatttgtttatgaagttggacgttgctgtagttcatttattttcactgctgtataatattatatgactacaaaaaatgtatacattctaaagttgacaaatatgtaggtttcagtttggtttattaccaatgatactgctgtgtttaatcccacatacatctggtgcacatttgcagacattgctcataggtatgctcctaaaaggtgaattgctggatgatcaggcaggtgtaactccagctgtaccacctaacgccagactcaaaagtaaccattccgtttcttgttgttggcccccattagccgtgtatgaaagttcttgttattccacattcttgtcaatacttgatattttcaaatatttcaatttctgccagtctggtgtgtgtgtagtggaatctctgtgattttcttttgcatttctctgattactaatgaagttgagtaccttttcatatgcttagtggctatttgagattcctcatttgtgaagagtgtgtttaagtcttgtgcctggatcgttattgaattgcctttttcttattgatttataggagtactttatatactttgaataagagtctttggtcagttacttatgtcacacgtatcttctgccattctgggacttgccctttcactttaagggtatcttttgatgaacataagtttttagtgtgttccaagttcagtagtatcttcctttatgggtagtgcttttttctgtgtgggttgggaaatctttccctactctgagattataatggttttatctgatattctctagtttctaacagcttattttgcttacattgttaaatctttaaagtatctgaaattgatttttgttcatggcatgaggtagggaccagtttcatcttttccccatgtggagacacggttctgacagcactatttctttctccactgctctatgtcaagtgtccatatacgcatcagcctatttctggacgatttattctgcttcattgatctctatgtctattctggtttgattactgtagctacaaaataaatcttcatattaagtaaagcaagtcctcctcctaagttgtttttcttctcagaagtgattgacccttctaggctttgtgcatgtccatatatttttagaattaacgtattagattcctaaatgatcataatgacattttattttgattgcatttattctaaaaatcaatttaatgaaaattgacaacagtattgattcttccattcaccgaacattatatcattttttctttttttggtcttacggcactggctcagtacagtgttgaagtcattagagcaggcatacccttaatcacatgaaggaatatccattcaattcctagtttcctaagagtttttatcataaaaggatgttgaattttatcaaacactttttctgcattattggaaaggcatgatttttttctctcatacacacatgcattgcatacacttaaacacaagacaatttcatatcaattaggaagggataaatggagttaaagtgcttcaacgtctttcaatgtcttgattaatattactgagaaattaaagatactttttttgaaagatgcatattttaatttccagggtaatcactaaaagaacagaaacagtgtgtaattccaaaataatacaaggagaaaatggaatgataaaatgtgaaaaataatctgaaagaagggaacaaaggagagaaaagacacaagtaaatagaaaagacattataaatagacttaaacccaaatatatcagtaattaagtgatttgtaaatggactaaatattccatttaaatgacacagattattagaaaaataaagcttaaaaaccttatatgctgttgataagagaaacatcaaaaacataagaaaaacataagttaaaaaaatagaaaaactatgttaggaaatcactaacaaaagaaagcattagtataggtatattaatatgagacaaaatagaatttaa

SEQ ID NO: 95437 - DNA, 263583 bp, Homo sapiens
agaatcttcccttcttaattctagagctgaaatatgcgctcagaaggagatgaataagtaaatgggaagaatgaatttctctggtctttcttcagctaggcaagaataatcaaattttgacttttgaaatgaaacaagttattatttgattatattaagatcagttgctaggtcaagaggatttttaaaccaaaattacacaaatgacgtaaattttcttggctcatgatacttgatacaactaattttagacaaagtgatttttagcacttccagctgcaaatataacagattcgagacaataattcaaccctaaatttttatattttgttacatttgaattatagtatttttgaaataaaggcacttttattgcaatttgactttcaaatgattagcatttgctttcttcaaccgatgaaagccatattattgtacttacattaggctagaagatacttcctaacagtagacaatctgtttcctaatattgttctacaaattgtcctctgacttctagaatttcactattcctggtttccaggccaacccattgcctcaaaatgagatgtggaaagtagaaagaatacatgggtttagcaaacacagccaggagtctatataacacacttcactctccaattccatagtaacagaactctaattttcttgaggaagaaagtatgcccagctataaaattacatttctcagcctctcattgtgcaaagaatgaccacagggcagagaactggttgataactgattaatacgccatcaggggcagttatttgatagggcttctgggaaagtttactaaatataaccaattcaattgacatccaggttttgccttttgcccttgctctttcaccttccacttgccaggaatatgtaaatgatacctggagacacagaagccatctgtgatgatgaattaaaatccacacatcaaaatggcagatagacgcaaaagattggacaccgttagctgccatagaagctctagactgcttatttccaggtttatgagaaagaaaatggagtctcttactagtttaagctactcttttggaggtactgatactgttggcccaagtcaatcttttaagcaatatattcagtgaaacatggacagaaaacaaaggaaattgtcttgcatttatataattatggaaattattatcttgagcagctcataaattggctctgaaatgagttccaaaacttgtgtttcaaaaatactttgaccaattaggaaaatgcaaatcaaaaccacatgagatgtcacctcatccccattaggatagctgctattaaacacacacacacacacacacacacacagagaaaataagtgttggggaggatatgaaaaaattggaacacttgtgccctgttggtaggaatgtaaactgcagaaaacagtatggtggctcctcaaaaaattaaaaatagaattaccatgtgatccagtaattctacttctgggtagattatccaaaataattgaaagtgagatccccaggaggtatttatacacctatgttcatagcaacattatttacaatagctaaaatgtggaagcaacccaagtgtccatggacggatgaatggataagcaatatgttgtatatacagagagtggaatattattcagccttaaaagggaaggaaattctcacacatggtacaaacacagataaaccttaaggacataatgccaagtgaaataagatggccacaaaaggacaaatactgtatgattctccttgtatgagtatctagagtagtcaaattcataaaaattgaaagtagaatggtagttgccaggggctggagagagaatagagcatttttgtttagtgggtgcagagtttcagttttgcaaaatgaaaaagttctggagactggttgcacaacaatgtgaatatacttcacactattgagctgtacacttaaaaatggttaaaatggtaaattttatgtgtattttaccaccattaaaaatacttcgatttaaccatataagtatagatggttgttgttaaatagcaaatctcaagttcttacatcatccaaaatgattaatttaaaaattatatatttcacatcctttatttgctatttgaaagccactgtagtaaaaagctccactaaaaaaattcatcaaacatactgggattagacatttgtgaggcatttattatctatcttaaataaaatatgtaaacctgtaaatatcaaacttgcagacccttaaattttaaaaaaagctataaagagttaagcttaaaactaaacataaaaaacctaaaccatactcgtttgattatgattttggtataatcttgtctagggaatagtgatgtaacaaattacataagtctctaaatttttcccaactggaatgagtagaaaacttttgtgtatttaagatatttaaataatatccaggcacggtggctcatgtctgtaatcccgacgctttgaaaggcaggggtgcacagatcgtttgagcccaggtgttcaagaccaacctgagcaacatggtgaaactccacatctacagaaaatacaaaaaattagccaggcatggcggcatgtgcctgtggtcccagctactcaagagaaccactgcactccaacctgggcgacagagactctatatcaaaaaaaaaaaacaaaaaaacaaaaaaacaaaaaaaacaactccaccctgggtgacagagagagaatctatatcaaaaaagaaaaaaaggaaaagaaaaagaaaaagatctttaatttaatttatttatttttgagatggagtcccatctgttgcccaggctggagtgcagtggtgcaatctcggctcactgcgacctctgcatcctgggctcaagtgattctcctgcctcagcctcctgagtagctgagactacaggcacctgtcatcacaccccgctaattttcgtgtttttagtagagatgaggtttcacaatgttggccaggctggtctcaaactcctgaccacacgcgatccacctgcctcggcctcccaaagtgctgggattacaagcatgagccaccacgccaggacaaaagatcttttaataataaaacgagaataggagaatagggtctttcttataagggaaatctggaaaacctacagaataatacttttaaaagtgagttcacccactggattttatgtaggcttagaaaattaaaattttattatataatgcaataatttggcagtaactttgtactcatgtcatgccattattatcattaaatacatatcattaaattcaagatgatttattctgttaaacacaagattcttattataaagcactcattaatcacttcttccacatatgatagaaactgctaccttcatcaattttattccttttatcctgcagtgaataacttttgtattgtattttgctaaaaagacttaggtagagttaggtccgtagttcaaagccaatctgtgccaaagggttattgatagtggattttaaaatactttgctactccactgactggagtggactttgctaatttactcaatttttgcattttagtatttttttatctgcacataggaatcacatatagaaggaatcttaaatatcacattgtcttatccttttgctctgtagatggggaaacaagcttggggatcatcattctgaggaatgtttcaaattaaaatttctaggagaacaccatgtaagataaaatgtataacaaatatattcatagatggcctagattagattaattttattctctttaaaagagaaatgagcattctcactattctgaactcacatatagtgaaatttttactaatatacattttattagtgtcctttaatagtctatttaatgtgccttttatatggccaattatttcttaaagatttgcagtccattggatatgctgacatgtaagacattcactgtcaatattttatttccttaatcccacaatctcaataaaaatttcgrtctaaatatgagtggaaatggggagttaattaaagcaaataattgtgaaagattcgtaatgtatttttctcgtatacactatggatagaaatgaagtgcatttgccttagctttctacattctttccataaagcaagggttcttcaatcttcatggagtccccaaataacatgtgaatgtgaagtattgtgctaggtactgcacgggatgccaaagatgaacaaggcatgagttctgggggaatatactatctctcacaggagaaataagtaagtagcgtactcaagtattaaagtgagaacttaagtgctatatggcagttacaataaagaggaaatttaaagtaaggatagatcataccaagtaggataaatcaggaaatgaaggctaaactttggaagtgagaaattattctggaaattcgtggaactgcttagcggaatagggttttctaaggaagggtactgactaagcaaatgaaacgaaaaaagggaatgactatgtttccgcaacttcaagagatccagcttccctgcagggcaaaggagtaacaggagagaaaaaaagcaatgaatccgtgcatccgctaaactcttttaccatatattttactctgacaaaacaactatcacgtattggccttttgtttgtttgtttttttgagacacggtctccctctttcgcccaggttggagggcagtggcgcaatcaccgttttctgcagcctctacctcctcggcttaagctaccttcccgcctcgaccttccaaagtgctaggactacaggcgtgagccaccatgctcaggcttattggcacttttctgtgcacttttaaatgtaatcctctaaatcactcttctccacctttcctgtgcataggaatcacctgtggttcccgttaaattggagatcttgattcattaggtctggggcggggcctgagcttctgcatttccattgagctcacagctgaagcctaccctggaccacaccttccaatggaaaaggctccagtgtgatttctagccactagtattatctgcgaacttgggagaaataaaatgcaagttctcggcccccgcaagggctctactgaatccgaaacactgtggggaggcccaccactctgcagtgttttaacaagcaagtggttaaagtttgagagccacccgtaagtcacgggtttcctaacatgattggacactggaatcacctgcggatttttttttttttttttttttttttttttttttttttttgagacggagtctcgctctgttgcccaggctggagtgcagtggcgggatctcggctcactgcaagctccgcctcctgggttcacgccattctcctgcctcagcctcccaagtagctgggactacaggcgcccgccactacgcccggctaattttttgtatttttagtagagacggggtttcaccgttttagccaggatggtctcgatctcctgacctcgtgatccgcccgcctcggcctcccaaagtgctgggattacaggcgtgagccaccgcgcccggcctgcggattttaactaatactactgatgccgcatctcaccccccctcccgagattctcaggtacggggcgtggccttggcggcggccttataaaagctctcccaggtgattccaacctgtagtaacacttgagaactgcgtgaggtggggacttcaactttaactggacttattttcctcctatgtaaaaggtggacaatatgcaagtggtcctgactttgcttccagattttggcaactccagagccctagttcggtctggagagccagcttcccgccccgtgtcctaaggcctctgtccgagaacccaaagtcctgggaatggacccgcgggagcggacccgcgggagcatctgtgacgccgctcagcaacccggcgccgccccggcggctccgacgtggcccagtgtccggctggcgtgggctctccaggccgcacccactaaaccgcgccggagcgggacacgcatgcgccggtctggacccggcacccagtaacggactcgagctcctcccaccggaagtgggcagccgcgcagcgggaagwgccggccgaagcgtggcggccacagactgtgggtaccgggtccgagggactcgcgcttttctctccgtgccatggcgccagcgaaagccacgaacgtggtgcggctgctactaggctccacagcgctgtggctttcgcagctcggctccgggacggtcgccgcgtccaagtcgktgactgcccacttggccgcgaagtggcccgagaccccgctgctgctggaggcaaggtgggtgcgggccgggccctygtccgggcgggtgtgggcgcgctgccaccctcagycgcgctttcttcgtgctcgcagcgggtgtctggctcccacccgggttctccagacgcccccgctctggccctgagcatcaccacctccttccttcccgacccggggcggcttctcggttcccgtgcagcactcacttgcagttcctttccccctcagtcttactttacctacgatttttaaagcttccctgcyctgctttaatacgttgggatgtattagcatttacgcgtggcacttaacgcaagagcttctactggggtaggcagttctgttcagacagtgcttaaagtacctagtttcgtaatgatgacatcataccatcagctcctaggcttactatggggagggcagcttcctgcaaggtaatatttttcctgtatctcttccaacggaattagttcatgacctgtcatttactctgcagaacaaaacttgtagctattgcattttgccctttagtattctagttgagtaaaattagaaagttctttctcttagcaaaaatgaagttttacaccaatgacttaatggctgttcaccacagcaacagtgtgtgtccctaaaaagagactccatgactccacataagttcatgtatttgatgctaaaagttctttttttttttcatttctatagtttattggggaacaggtggtgtttggttacatgagtaagttctttagtggtgatttctgagattttggtacacccatcaccccatcagtatatacactgcacccaatttgtagtcttttatccctcactcccttctcaacctttcccccgagtccccgaagtccattgtgtcaatcttatgcctttgcatcctcatagcttagttcccacatatcagtgagaacatactatatttggttttccatttctgacttacttcacttagaataatagtctctaatctcatccaggttgctgtgaatgccattaattgattcctttttatggctgagtagtgttccatcatatatatgccacagtttatccactcgttgattgatgggtatttggattggttccacatttttgcacttgtgaattgtgctgctataaacatacttgtgcaactatctttttcatgacttcttttcctctgggtagatacctagtagtgggattgctggatcaaatggtagatctactcttagtactttgaggactccccacactgttttccatagtggttatactagtttacattcccaccagcagtgtagaagtgttccctgttcgctgcatccacgccaacatctattatttatttttatttttttattatggccattcttgcaggagtaaggtggtatcgcattgtggttttgatttgtgtttccctgatcattagtatgttgagcattttttcatgttagccatttatatatcttttgagaattgtctattcatgtccttagcccactttttgatgggactgttttttttttcctgctgatttgagttccttgtagattctggatattaatcctttttcagatgtatagattgtgaagattttctcccgttttgtgggttgtctgtttactctgctgactattccttttgccgtgcaaaagctgtttagtttaattaagtcccagctattttttttattattatactttaagttctagggtacatgtgcacaacgtgcaggtacatagatatacatgtgccatgttggtgtgctgcacccattaactcatcatttacattaggtgtatctcctaatgctatcccccgctcccccaaccccacaacaggccctggtgtgtgatgttccccattgtgtgtccaagtattctcattgttcagttcccacctatgagtgagaacatgaggtgtttggttttctatccttgtgatagtttgctgagaatgatggtttccagctgcatgcatgtccctacaaaggacatgaactcatccttttttatggctgcatagtattccgtggtgtatatgtgccacattttcttaatccagtctatcattgacggacatttgggttggttccaagtctttgctattgtgaatagtgccgcaataaacatgtgtgtgcatgtgtctttatagcagcatgatttataatcctttgggtatatacccagtaatgggatggctgggtcaaatggtatttctagtcctacatccttgaggaatygccacaatgtcttccacaatggttgaactagtttacagtcccaccaacagtgtaaaagtgtccctatttctccacatcctctccagcacctgttgtttcctgactttttaatgatcgcccttctaactggtgtgagatggtatctcattgtggttttgatttgcatttctctgatggccagtgatgatgagaattttttcatgtgtctgttggttgcataaatgtcttcttttgagaagtgtctgttcatatccttcaccyactttttgatggggtcgtttaatttttttcttgtaaatttgtttaagttctttgtagattctggatattagcccttggtcagatgggtagattgcaaaaattttctcccattctgtaggttgcctgttcactctgatggtagtttcttttgctgtgcagatgctctttactttaattagatcccatttgtcagttttggcttttgttgccattgcttttggtgttttagacatgaagtccttgcccatgcctatgtcctgaatggtattgcctaggttttcttctagagtttttatggttttagatctaacatttaagtctttagtccatcttgaattaatttttgtataaggtgtaaggaagggatccagtttcagctttctacatatggctagccagtttttccagcaccatttattaaatagggaatcctttccccatttcttgtttttgtcagatttgtcaaagatcagatggttgtagatgtgtggtattatttctgagggctctgctctgttccattggtctatatctctattttggcaccagtaccatggtgttttggttactgtagccttatagtatagtttgaagtcaggtagcrtgatgcctccagctttgttctttttgcttaggattgtcttggcaatgcgagctctcttttgtatccatatgaactttaaagtagttttttccaattttgtgaagaaagtcattggtagcttgatggggatggcattgaatctataaattaccttgggcagtatggccgttttcacgatactgattcttcctatccatgagcatggaatattcttccatttgtttgtgtcctcttttatttttttgagcagtggtttgtagttctctttgaagaggtccttcacatcccttgtaagttggattcctaggtattttattctctttgaagcaattgtgaatgggagttcactcatgatttggccctctgtttgtctgttattggcatagagcaatgcttgtgatttttgtacattgattttgtatcctgagactttgctgaagttgcttatcagcttaaggagattttgggctgagatgatggggttttctaaatatacaatcatatcatctgccaacagggacaatttgacttcctcttttcctaattgaataccctttatttctttctcctgcctgattgccctggccagaacttccaacactgtgttgaataggagtggtgagagagggcatccttgtcttgtgccagttttcaaagggaatgcttccagattttgcccattcagtatgatattggctgcagatttgtcataaatagctcttattattttgagatatgtcccatcaatacctaatttgagagtttttagcatgaagggctgttgaattttgtcaaaggccttttctgcatctattaagataatcatgtggtttttgtctttggttctgtttatatgatgaattatgtttattgatttgcatatgttgaaacagccttgcatcccagggatgaagcccacttgatcatggtggataagctttttgagatgctgctggatttggtttgccagtattttattgaggtttttgcattgatgttcatcagggatattggtctaaaattctctttttttgttgtgtctctgccaggctttggtatcaggatgatgctggccttataaaatgagyyaggsaggattccctttttttgtatcaattggaatagtttaagaaagaatggtaccagctcctctttgtacctttggtacaatttggctgtgaatctgtctggtcctggactttttttgtttggtaggctattattgcctcaatttcagagcctgttattggtgtattcagggattcaacttcttcctggtttagtcttgggagggtgtatgtgtacaggaatttatccatttcttctagattttctagtttatttgcgtagaggtgtttatagtattctctgatggtagtttggatttctgtgggattggtagtgatatcccctttatcattttttattgcatctatttgattcttctcttttcttctttattagtcttgctagcggtctatcaattttgttgatcttttcaaaaaaccagctcctgaattcattgatatttttttgaatggttttcttgtgtctctatctccttcagttttgctctgatcttagttatttcttgccttctgctagcttttgaatgtggttgctcctgcttctctagttcttttaatttgatgttagggtgtcaattttagatctttcctgctttctcttgtggacatttagtgctataaatttccctctacacactgctttaaatgtgtcccagagattctggtatgttgtgtmtttgttcttattggtttcaaagaacagctttatttctgccttcattttgttatgtacccagtagtcattcaggagcaggttgttcagttttcatgtagttgagtggttatgagtgaatttcttaatcttgagttctagtttgattgctgttgtctgagagacagtatgttataatttctcttcwtttacatttgctgaggagtcctttacttgcaactatgtggtcaattttggaataagtgcggtgtggtgctgagaagaacgtatattctgttgatttggggtggagagttctgtagatgtctattaggtctgcttggtgcagagctgagttcaattcctggatatccttgttaactttctgtctcgttgatctgtctaatgttgacagtggggtgttaaagtctcccattattattgtgtgggagtctaaatctctttctaggtctctaaggacttgctttatgaatctagttgctcctgtattgggtgcatatgtatttaggatagttagctcttcttgttgaattaatccctttaccattatgtaatggccttctttgtctcttctgatctttgttggtttaaagtctgttttatcagagactaggattgcaacccctgcttttttttgtttcccatttgcttggtagatcttcctccatccctttattttgagcctatgtgtgtctctctcacatagcaaggagctgcgttcctttggaggagaagaggcactctgatttttagaatttgcagcttttctgctctggtttctccccatctttgtggttttatctacctttggtctttgatgatggtgacgtacagatgggattttggtgtggatgtcctttctgtttgttagttttacttctaacagtcaggaccctcagctgcaggtctgttggagtttgctggaggtccactccagaccctgtttgcctgggtatctacagcagaggctgcagaacagcaaatattgcagaacggcaaatgttgctgtcttattgttcctctggaagcttcgtctcagaggggcacccggctgtatgaggtgtcagtcggcccctactgggaagtgcctccccattaggctacttggggttcagggatccacttgaggaggcagtctgtctgttctcagatctcaaactccgtgctgggagaagcaccactctcttcaaagctgtcagacagggacatataagtgtgcagaagtttctgctgccttttgttcagttatgccctgacccccagaggtggagtctacagaggcaggcaggcctcctggagctgtggtgggctccacccagttcaagcttccagactgctttgtttacctactcaaacctcagcaatggcgggtgcccctcccccagcctcactgctgccttgcggttggatctcagactgctgtgctagcaatgagggaggctccgtggacatgggactcttcaagccatgcgcaggatataatctcctggtgtgccgtttgctaagaccgttggaaaagcgcagtattagggtaggagtgacccgattttccaggtgccatcygtcacggcttcccttggctaggaaagggaattccccgacctcttgcactttccgggtgaggcgatgccttgccccgcttcggctcacactctgtgggctgcacccactgccctgtacccactgtctgacaagccccaatgagatgaacctggtacctcagttggaaatgcggaaatcacctttcttctgcatcgctcatgctaggagctgtagactggagctgttcctattcagccatcttggaacctctctcctatttatctttgtttttattgcatttgctttggggttcttggtcatgaaatccttgcctaagccaatgtctaaaagggtttttctgaggttatcttctagaatttttatagtttcaggtcttagatttaagtccttgatccatcttgaattgatttttgtataacgcgagagataagaatccagtttcattctcctacatgtggcttgccaagtatcccagcaccatttttttgaatagagtgtcctttccccactttgtttttgtttgctttctcgaaggtcagttggctggaagtatttgggtttatttctggattctctattacgttccattggtctatgtgcctgtttttacaccagtaccatgctgttttggagactatggttttatagtatagtttaaaatcaggtaatgtgattcctccagatttattctttttgcttaatcttgctttggctgtgtgggctcttttttggttccatatgaattttaggattttttttctagttttgtgaagaatgatggtggtattttgatgggaattgcattgaatttgtagattgcttttggcagtatggtcattttcacagtattgattctacccatccatgagcgtggggtatggttccatttgtttgtgtcgtctatgatttctttcagcagtgttttgtagttttccttgtagagatctttcacctcatttgttaggtgtattcctaagcattttatttttgttggagctgttgtaaaaggggttgagttcttgattagattctcagtttggtcgctgttggtatataagagagcaactgatttgtgtacattaattttgtatctggaaactttgctgaattcttttatcagttcttggagctttttggaggagtctttggggttttctaggtatataatcgtatcatcagttaacagcgacagtttgacttcctctttactgatttggatgccctttatttctttctcttgtctgattgttctgactaggacttccattactatgttgaatagaagtggtgagagtgggcatggttgccttgttccagttctcagagggaatgctttaaacttttccccattcagtattatgttggctgtgggtttgtcatagatggcttttattacattgaggtatgtcccttgtatgccgattttgttgagagttttaatcataaaggggtgcttgattttgtcaaatgctttttctgcgtctattgagatgatcatgtaatatttatttttaattctgtttatctggtgtatcacatttattgacttgcctatattaaaccatccctgttatgaaacccacttcataatggtggattatctttttgatacattgttggattcggttagctagtatattgttaaggatttttrcatctrtgttcatcagggatattggtatgtagtttccttttttggttatgtttttttcctggttttggtattcggatgatactggcttcatagaatgatttcaggaggattccctctttctgtctcgtggaatagtgtcaataggattcgtacgaattctttgaatgtctggtagaatttggctgtgaatatgtctggtcctggacgtttttatgttgacaattttttattacaattttaatctcgctgcttactattgttctgttcagggtatctaattcttcctgatttaagctaggagggttgtatctttccaggaatttatccatctcctctaggttttctactttatgcatataaagttgttcatggtagccttgaatgatcttttgtatttctgtggtgtcagttgtaatagctcccatttcatttctaattgagcttatttggattttctcttttttcttcttgtttaatcttgctaatggtctatttatgttatcttttcaaagaactagctttttgtttcatttatcttttgtattttttgtttgtttcaatttcatttagttctgctctaatcttggttatttcacttctactgggattgggtttggtttgttctgtttctttagttccttgaggttagaccttagattgtctgtgcaccttcagactttctgatgtaggsatttagggctatgaactttcctcttagcagagcctttgctgtatcccagaggttttgataggttgtgtcactgttgttgttcggttcaaaaacattttaaatttccatcttgatttcattgttgacttattcaggagaaggttatttaatttccatgtatttgcatggttttgaaggttccttttagggttgattttcagttttattccactgtggtctgagagagtgtttgatataatgtcagttttcttaaatttattgaggtttgatttgtggcctatcagtggtctaccttggaaaaagtttcatgcactgatgatgaatagaatgtatattctgtggttgttgggtagaatgttctgtaaatatctgttaagtccattttttccagggtatagtttcaatccattgtttctttgttgactttctgtcttgatgacctgtctagtgctatcagtgcagtattgaagtctccaactattattttgttactgtgtatctcatttcttaagtctagtagtaattgttttataaatttgggaactccattattgcatatatatttcagattgtaatatttccgtgttggacaaggccttttatcattatataatgtccctctttgtctttttttaactgttgttgctttaacatttgttttatctcatataagaatagctactcttgctcgcttttggtgtccatttgcatggaatatctttttctacccctttaccttaagtttatgtgagtccttaggtgataggtaagtctcttgaagacagcagatggttggtgaattcttatccattctgcagttctgtatcttttaagtggagcatttaggccctttacattcaatgttagtattgagatgtgaggtaccattctattcattgtgctatttgttgcctgtataccttgtttttttaattgtatttttgttttataggtcctgcgagatttatgttttaaagaggttctgttttgatttattcccatgatttgtttcaagatttagagctccttttagcagttcttgtggtgctggattggtagtggcaaattctgtcagcatttttttgtctggaaaagactgtatctttccttcatttatgaagattagttttgctagatacgaaattcttgactgataattgttttgtttaagaggcagaagatagggccccaatcccttctagcttgtagggtttctgctgagaaatctgctgttaatctgataggttttcctttataggttagttacctggtgtttttgcctcacagctcttaagattctttccttcatcttaactttggataacctgatgactatgtgcctaggcaatgatctttttgtgttgaatttcccaggtgttctttgagcttcttgtatttggatgtctaggtctctagaaagggtggggaagttttcctcaattattcccccaaatatgttttccgaacttttagatttctcttctttctcaggaatactgattattcttaggtttggtcatttaacataatcccagacttcttggaggctttgttcatattttattatccttttttctttgtctttgttgtattgggttaattttaaaaccgtgtcctcaagctctgaagttctttcttctgcttatttgattctattgctgaaactctattttacatttctataagtgcgtccattgtttcctgaagttttgattgtttttatttatgcaatctatttcactgaagatttctcccctcctttcttgtatctttttttttttatttccttaaatggggctttgcctttctctggtgcctccttgattagcttaataactgaccatctgaattcttttcaggtaaatcaggcatttcatcttagtttggatctattgctggtgagcgagtgtgatttttttggggggtgttaaagaaccttgttttgtcatagtactagagttggttttctggttccttctcatttgggtaggctctgtcagagggaaggtctagggctgaaggctgttgttcagattcttttgtcccatagaggtgttcccttgatgtagtactctccttcttttcctacagatgtggcttcctgacagccaagctgtagagattgttctggatctagccacctagtaggtctaacaggctccaggctggtactaggaattgtctgcacagagtcctatgatctgaactgtctatgggtctcttagctgtggataccagcacctgctctgctggaggtggcaggggggtgaaatggactctctgagggtccttactttttgttgtttaatgcactatttttgtgctggttggcattctgcagggaggtggccttttcaatagagcatcagctgtggtagtatggggaggatcaggcagtgggtgggccctggaactcctaagagtatatgccctttgtcttcagctaccatggtgagtagggaaggaccatcagataggggcatttctagggcatgtctgggctcagactgtccttgggtgggtcktgttgcaactgctgtgggggatgggggtgggattcctaggtcaatggagttatattcccaggaggattatggctgcctctgctttgtcatgcaggttgtcagggaagtgggggaaagcctacagtcacaggcctcacccagctcccatgcaacccaaaaggccagtctcactccctctgtgccccacccaacagcactgagtctgtttccaggcggtgggcgagcagggctgagaacttaggtggtgggcgagcagggctgagaacttgccccaggctaccagcctcccagctgcaaatgcaaatagggctctcatgcttccccacctgtggagtttgcacaccagattcatgccctctcccaagttctggccaggagatttcttgttcctttgaaattgttacaaggttcagctggaggtttccttctccctgtggcctcttcccagtacctctggcagccctacccgaggacccctgtgaggcaaggcagaaatagcttcctaggggacccagagagcccacagggcttttcctgctgcttcctctacccttgtattttgcttggctctctaaattgactcagccccaggtaaggtcagaatcttctccagtgatatacaccttcgggttccccagtgagagtgtgttttcaggggcagacaatccccctttcccactctcacagtttgggtactcagagtatttggggtatctcccaggtcctacaggagcaattcatttccttcagagggtctgtgggttctcttggcttttctaatttattcctgcagcagttctggagcaaaggttcagaattcaagactccacatgctgctctgtccatttgagtgggaggctaaaacggtttttatttaatacctgattctagcttaattttgatccccttcctttatcctttccccagtatttaactgtttgcctagatctgatctcacacttagctccaaatcagtctaactttttccagccttagactgcttgttacagtatctggctttacatttgccttgagagtcttagagttggaactgctgtgttatgctccttaaggtccttgacagtctagccgcagtctgatttacaaaccccatcacttgtacaaattgtccccaacttatcatggttcaatttaggattttttgactttactatgggtttrccagggtattaaatgcattttttacttatagtatttgcaacttaatacttaataaacccaacttaatgggtttattgggaggtaaccctaagtcaaggggcatctgtagtaggttgaatgctggcctcaaaaagatatgtccacatcctaactcccagaacctgtgaatgttaccttatttggaaaaatgtctgtgttaatgtaagtaaggatcttgagatgagatcatcttggattatctagatgggccccaaatccaatgtcattttaagagacagaagcagagaagacacaggcaaaaaggagaaggccatgtgaagttagagattggagttaggcagcctcaagccaaggaacagctgaagccaccaggatggaacagtctcccttagagccttcagagggagcacagccctgccaacaccttgattttggacttctggcctccagaattgtgagagaataagtttctgttttaagtcaccaaatttttcataatttgttaaacagatctaggaaactaatacagattttggaccaaaaagttgggtgctgctgtaacaaatagttcaaaatgtagaagtagctgtggagttggacagaggctagaataattttgagaagtttggtattaaaagcctagactgccttgaggagacttcagaaatctggacattaagggtgattctgctgagggcttagaagagattaaagggcatagttgaaaaaacttctgtcatcatagagaatacttatatcatcctgaagagaatttcagtagaaatatgaacattgaagtctgttctggccatggcttggaaggaaatgagagacattatattggaatctagaagaaaggtaacccttgttatgtagtgatacaataccggctgacttggtttctacagtttgtggaaaacatcttgaaactggtgaacttggatatgagctgaaaagatttccaagcaaagtgttaaaagtgctgcttggtttctcctcgctgcctatattaaaatgagagaagaaagagataaatttaaaaaggaacaggtaaggaaaaaggaaccarcacttgatgattttggaggttctcagcctatccagattgtaaagagtgttacaactaggaaactcagtgttgggaatgtgtgctctggagagaaagacagaaacctggcaggacaaccttttgctgaacaggttaagcatgtgattcatgggtcccctcaaccatctccccagaagcttggtataaagaaggtggggatatccaggaaggatctggggaggatccgtgtaatgatgtggctcttggtgaaatatacaatagtcttacaaagttttggggaatgtattagaaacactgtcagcttggaccgaaagagacaagacaaaatgaaagaaggctgttggacttccaaaattctataggcaggaaatggactatagagctacttggctgtaaacattgtgctgccctttcaagaaagaaagaataactctgcaagcagaaccatggcaggcagcacagagggtgaagcatcaggccacagagagttattctcaggctttgaaacataatggaaatttgccctgctggattttgaacttgcctgtgaccagtgacccctttattccttctatttttttcctttgggaattagagtgtccatcctatgcctgtctctccattgcattttggaaacataacttgttttctagtttcacaggtggacaggggagaattttaccccaggatggatcatacccagagtctcacccatacatgatttagatgataaaatttgtaaatgaagttgaygatatttacatgagattttggacttagaattgatgctgtaattggttgagtttttggaggttgttggcaaagggaaatatattttatgtaggggaggtggattttgggggcytttgggggctagagggtggcttgaatgatgcacccaacaaaaaaagggcagcttttagaatcttttgcattaactctgctcaaaccttgacttcagacttttggcctccagaactatgagagaataaatttctcttgctgaataggttagacctgtgattcatgaatccactcaaccatctcagcagaagcccagtacaaacatggcgttatccaggaaagatgtgtagaggatccttgggtaatggtgtggtagccctaggatagtaatatatcattcttttacagtcttcctcattgataccttacttgtgggcataccatattactctatcttgcctgatactttcccatgacaaaattaataactttctattattctctcatagcatttggccagtatttctgtaataatccttactgtaaggtatcatatatgctaatctctgttgttaaaaggtgagcttcagagacaaaactgttttttattcatgtttattttgccaaggcacagtgcacaaaagttgggtactcagtaatgctaattcaacaaaaggtactttttatagggaaaggtatactttaagccaccatcagaattacctctacaatataccttacttgtggaaactagtttgtccttggaaaatccagagaggatgctcagtgttacctcatgtgccttattgttttgttgtgaacaaatcaaaattgtaggaggtcctttattatataaactaaaatctttctctctataccttttatctactgatcctctctttcagaaccaaatctgtttctgtgtgtgacacattatgtgagaatagcaggccaaaagcctgtagtttcttcaaccactgcacttcaaaaaatttattttatatagttcgttattctgctttccttcaatttgtttatgtttctcttaaaattgtaggaaaagcaaagaggttgagaagagtaagtgtggaagtggaagaattgaagagcattgaataggttgaaggagctgggcagataggaacttaaggaaaataatgtgggagcaagtgagggaaatttttaagaataatgctttaaatccaaaaattgagcttcccaaccaaaatctataaatgcatacacacacacacagatatttttcagttcatcctggaaatttgagtgcataacttgagtatagtcttatgtaggaaacaaagatgaataaggtatgtcccctgtataaagaaatttatagtataataaaatttgcggccaagcgcagtggctcaggcctgtagtcccagcacttggggaggccgaggcgggcagatcatgaggtcaggaatttgagaccagcgtagccaacatggtgaaaccctgtctctactaaaaatacaaaaaatagctgcgtgtggtggcacatgcctataatcctagctactcaggaggctgaggcaggagaattgtttgaaccagggaggtgaaggttgcagtgagtcaagatcgcaccactgcactccagcctgggcgacagagcaagactctggctagaggtggttataggctgaaraggctagcattttacagtatgcataccttaatttgtacatctgaactgcagttattctacttgtgttgatctgactgaaaatatttttgaaattccacttataattactgtcaaactctttagtgcgtataaaaacaccctttgtagaaataactgttttctctgggtagaattttttgaagaaatacacttattttgagccatatattttgtaaggcaagtgaacaattgcaaatgccagcttgttacctttaaaaaaactttgtccaaaagagtgaactgggcatggtggcatgtgcctgtagtcccarctacttaagtggctgcagtgggaggatcgcttgagacctcccaggctaaagtaagccatgtttgcaccactgcactccagcctgtgtgacaaagggagatgctgtcttaaacaaacaaacaaaaatgttgttcaaaggtaatatcttaccttytaccaggtgcagaactggtttagatggtctcaaggatgtttgctcttcagtgattaataatgagttaccagtaaatggcctctgagattccagaagagttccaaaagtgcttagagcagtgatgtattgagggaataacttttaagtgaatactttttttttttttacttgaacttttaagttccagggtacacatgcaggatgtgcaggtttgttacataggtaaatgtgtgccatggtggtttgctgcacagatcaaactatcacctaggtatgaagcccagcatccattaactttcttcttggtgctctccgtccccttgcacctttccaacagagtccagtgtgtgtcgttacccccatgtgtccatgtgttctcatcattcagctcccacttgtaagtgaaaacatgcggtgtttgggtttctgtctctgcattagtttgctgaggataatggcttccagctccatccatgtttctgcaaaagacatgaccttgttcatttttatggctgcatagtattctgtagtgtatatataccacattttctttattcagtctatcattgatggggatataagttgatgccatgtcttygctattgtaaatagcgctgcagtggacatatgtgtgcatgtatattcataatatgatttatattcctttgggtatacacccagtaatgggattgctgggtcaaatggtatttctgcctctagatctttgaggaattgccacactgtcttctacaatggttgaactaatttacgttcccaccaacagtgtagaagcatttttttctccacaaccttgccagcatctattgtttcttgacttcttaataatcaccattctgactggtgtgagatggtatctcattgtggttttgatttgcagttctctaatgatcagtgatgtggagctttttttcatgtttgttggccgcatgaatgttttattttgataagtgtctattcatgtcctttgcccactttttaatggggtcgtttgtttttttcttgtaaatttgttgaagttccttatagactttgcatgttagacctttgtcagatggatacattgcagaaattttctcccattctgtaggttgtgtgttcactctggtgatagtttttgttgtgcagaaactctttagtttaaatagatctcatttgtcaatttttgcttttgttgcaattgctcttggcatttttgtcatgaaatcattgcttgtgtctatgtcctgaattgtattgcttagattttcttatagggtttttataattttaggttttacatttaagtctctaattcatcttgagttaatttttgtataaggtgtaaggaaggggtccagtttcagttttctgcatatggctagccagttctcccagaaccatttattaaatagggaatcctttcattgcttgtttctgtcaggtttgtcaaatatcagatgcttgtaggtgtgcagtcttatttctgagttctctattctgttccattgatctatgtgtatgtccttgtaccagtagcatgctgtattggttactgtaaccttgtagtatagtttgaagttaggtagcatgatgcctccagctttgttctttttgcttcagattgtcttggctatttgggctctttttcatattttctaattctgtgaagaatgtcagtggtagttttgtcacaggataaggatcccgtgataagggttttggctttgccagccggaaacctctatggctggtagcacctttgccctagttttgctcgggcctgctgtgctccttttgtccactcggcctggcaggctatgctcggcttgtgttactggcctggatcccacacctgccaagggggagccaggtgcagggcggcggtgagtgtgtgagcaagcacagggtccggccactgcgcacagccaggagtgccagctgcagtggggtgggcagctccaggtactggcacaggcaccagctttgtacaagactgtggctcgaccaggcatactgcaggtggcttccactgcaggcactgtggtggaatgcagtggcacctggaagcttggagataccaggaaccacacagccctaaagagagtgagtgtcacagctctggctcagggagcctgtaggtctgggctccccaaagggctgyagctcttctctccttttcattgcctgcaatgtggtgagtggggcacgtgtttcagccctgttcatgttacagctctttcagtcctgccatttggtgagttccaagttcttgttgcatgttcaggaagaatgaggcatgtagacaactggaaggtgagcaaggcaaagaggtgctttattgagagacagtacagctcttaggagaactgaagttggtagctcctttctgctggcagatcgtcttgatgagcgcagctgtcactagagaggagacatggagtgggtagctccttttcacaggcaggtcattctgttgagtctgcagccctcagctgagaggagaaatggagtggccaccttccacctgcagtcaggtcatcccgatgtctgggagaggacacctggaatgggtagctcctatccacaggcaggtcatctcattatctgcctgagtttggctgagtctggggtttttatgggcttcagaggggggtaagtgtgtgctgactcgtccatgggaggccctgggtaggccgggacaaaaacaccgtacgttctcactgcagtccatggaagaggtagcccagcccccaggcttcaggttgtccttagcttgaaggtggggcttcaccggggacccatccctttttgcccatctgctccctgccaccattaacctgccatctaccatgtccatggcacccaggcagttcgcgtcatggggcacctttcaggcctgtgccaagctgctcccaggccctcttggcctcccttccatgcccattggtgcccaaagtctggagggggctgaggtggtagggggctggcatgtcagcactaccccaaacatgtacaaccagccgggttgtggcagcttctaggctcaggtgcaactttgctccgaaattgaagcagggattgggagcagagaagaggccaggaagcaggagcaggcactttcaagtctgtgttgggacagggggctttgcaggcccctgagagtgcagggatgcgttggtccacagctgcagctgggtggttgcagctgcacccagggagtgcagggctcccaccccgccaactcagtaggaggcatgggctcctacctgccttcagcccccaaaagcacagggatgtccgggtccggacagctgcacctggggagtgcgggccctccaccctaccaactcagaagtgggtggggcttccacctgttccttgctcccaccagctccgtggagtacacaaccctggccatatctcccttgctacagctggcgtttttgcagctgccactctagacaggtcactgctgccatcagtttactaggaatagcattgaatctataaattactttgggcagtatggccattttcacagaattgattcttcctatccatgagcatggaatgtttttccatttgtgtcctctctgatctccttgagcagcgatttgtagttctccttgaagaggtccttcacttcccttgttagctggaacactttcttaaggcgatcactttgaaggatcagacttagttagatgtacagattctggtagttggaagaagtttttacctgtggttgcacagtatatgagcatgtctgtagctgtttggtcaaatcagttaagccttgcccagtgttgatttgaagttacttattactctaaattcctatgcttgtcgtgtttatgttgatgaattaatcagtctttctgacttcctttttcctttttagtggccatgtcagactcacaagaattagttaatctgtatgtgttgtggatgttctcaatactttccatttattttaagcattagtttaagtttaccaagcctagagagaaaggtaaggtgggcaataacaaataatcagcaccatgtgtatggtggctgttttgtttctagcttaaatatttaaccctatttgttttagctctctagtgttttgttctgtgcagaactaaatctttcatttatttcattatttctgaaaggctttaaatggctttggccattttttcttaaataccatgaaaatttcattgggctttatggccaaagacatagtgcagtacactgatttcctgtttttaaaattaagatcttttctgttttaaataataaaaaagattttctacacaagtaaaggcaatagataatataacttctataaaatatttatagaaccagtttttgtttatgaaacaggtggtcttttttttctactttttacctttatataatgttctatcttaattataatttttgtatttctcagtggcatttcatatggcaagatagaataaactatcaattttttagttgttgctaataacaaggaaaagccaaaggtaatttctcatgaagccttttcctgacatgattatatgtttatagttgagaatgatatctcaggtaagaatagtcagtgtgtttttttccagtgttatagtaaatggaaattagtaatttgacattaatttttaggggtttttgtttttgccatagatataatttggttcttgagtacagtttatagtatctaaaccattttaaattccatctactaaccgattacttctatttttttaatagtgaatttatggcagaagaaagtaatgaaaaattttggcagtttttggaaactgtgcaagaattagcaatttataagcaaacaggtaggtgatatgtaaattttaacttgtaagatttgtatttatgtacacacattgtaatgtttattattttttaatggtaatggttaagtgtraatgcttcactgggttagtaaatccgaacattaaatttgaaaatatgttttaatagaaaccattctaagcatctgtttccaaaaatacaaggttttaatactttattataagatacctcatataattagtcatgtttggatattgcattctcatcaagaagaaatcaaaattgttacctgggcatggtggtgtgcatctgtagtagcagytacttggaaggcccaaggccagaggattgactgcttgagcccaggagtcagagactagcctgggcagtatagcaagaccctgtttctaaaaaagaaaaataaaaaaataaaataaattggccaggtgtggtgtttcacacctgtaatcccagcactttgtgagactgaggtggaggatcacttgaacccaggagtttgagctgtgtttgtaccactgcactccagcctgagcgacagagagaggccttgtctcccctgtcccccccmaaaaaaattaagatagttttctttttacctagatttctttgaagtaataattttgcatctagtaatagtacatttttttcttttttaaaagtagacttaatttttttagagtagttctaagttcatagcaaaattggacagaaagtacagagatttcccatattcccccttcccctacacataaatagcctcccctgttatcaacatccctcactagtgtggtacatatatatctgttgatgaaccttccttgacagatccttaatacgcaaggtccatagtttacattagggttcaatcttgctgttatacgttctatgggtttggactaatgtatactgacacgtatattgcatttttattggcagaatactttgactcttaaaccattaaagaaacttttaatacctcaaaaagtcaggtaactaatatgctctcatttcactatttgtaagatagtaatttctgtttttatatgtatatgagagtatatacctatatatacgtatatcttcctcagaattaaaaagtgtttattaatgtgtttattattttcctatctctgcagagactagaatagatgacatgagcatggaatcccttaagagtaaaatcttcagccatttagatatagagacatcttcttactattggtgattaaaatagtttattattttgttcctgagtgtaaatgtaagataaactaagtttcagatgttttaaatgctcatttactgaagcctgtttggctcaggtagccttgaagttcagtgattttgtgatttcacaaagtagattttaaaaataaagagatcagacatgcttttaataacattttaaactgaaatatttccaaaagcaaataatttttcctttcaaaattttttcctgaaaaagctttttagtyataagaaatgctggaggtactttagatgatgggaatacaaagatgaataaatgggatctacatccacaggactttgtgaaacaatgaaggagacagcaaaacagtgatgtacactattaggcgataagagctttaattgggtcatgcataacatgaaaacacataaaagaggcacctagtcagtgttccagagasagcaagacaggattttcagtgctgaatgctggagctgagtttgaatgatgagatttagccagggagtagggaacacaaatgagtagaagagaccggaatggaatgtgtggaggaacctcgatcacttagtaatgtttactttcaaatcattaggaaattactgtckgttgtcctcatatttgtcctagtaattttattaatagttttggtgattgaggtaaaagtaggctagattaatatgtaaggttttcatggttaatgtcaagtatccaagatagtttaaaaaaacctaacaccaaatttcgtgtctctcacctaaaatcctcaatatatctgtcccatatatgttgttctcagtacatgctttttggccttattcagtgctattttttattggagacgcaatcttaaaaattactcctgtaaatttcaaattcattttaagttacttaaatatatcagcatattttatacctaaatgaaatgatatacctggacaatctggtggcagatcattcacaagctggaatataagctcaggagtacctaaactctacatcaagcatatatggaaggaggtatttcaagtgttttcagggttgaacctaaattgtattaaagtaggaattactagcacagcacagtggctcatgcctgtaatcccagcactttgggaggctgaggtgggcagatcacttgaggccaggagttcgagaccagcctggccaacattgtgagaccccgtctctactgaaaatacacaaattagctgggcgtggtggtgcgggcctgtaatccagctactcgggaggctgaggcacaagactcacttgaacactggaggcataggctgcagtgagccgagatcacaccactggactgcagtctgggcaacagagtgagactctgactcaaaaaaawaaataaataaataacacttaaaatataattctattggctttatttataatggcagagtctaatgcatgtggtgatattattgctgaccttgttaaatgtggaaaagaatggtacaaatgagaaataatgagcagagatttttttttgagacggtgtctcactgtgtcgcccaggctggagttcagtggcatgatctcggctaactgccagctccgcctcctgggttcacaccattctcccacctaagcctctgaagtagctggggctacaggtgcccaccaccacgcccggctaattttttgtatttttttttttattagagacggggtttcaccgtgttagccaggatggtctcgatctcgtgacctygtgatccgcccacctcggcctcccaaagttctgggatttacaggtgtgagccaccgtgcccggcctaatgagcagattttactgaatttgttttcaagacatcttagaggaaacatttaataatcctctgttacttgtactaatttaggttgttgaatctccatgagaccttctaaatactctttactaaagcatgtcttagtgatccacctgcctaaaaaaattgtaaatattgaacatttaactttttgaattcaagtactagttttataccatttaatgcaattactttatattatatgccagcaaattaagactttttaagcaatgaattgcctgtttaaaaaaatttatatggttctgccagacttacatatttattgatgcttcaagattcaagtggcatattagttaacctatgtagttttgtgaggtgagaaatgtcacccaagatttatctgatttccaaatgcctgtttatttttacttcttcacatgctgctcagcatataagaatgtcattttcaaagtccttgaagattttagtggtttttacacaaattaagttgcttttgtattttattaatggaagaaattttcaaaaaatgttaaggctttctaacatagttacttttacccaagaaccagatttgggggaagaaggtaattggaatttggacgtgccacatttgaaatgcttgtgaaatatccaaatataaatatatcggtaagctgatatatgagtgagagatctagataaaataaattataggataaagggtaggatttcagagtgatcaatatgaaaaacggtaatttaagttgtagggagaaggcacagaatgagaataaaatagtgcccagtggcagaaccctgagaacagcaatgtttaagggaatctgatgagaagaacagcacacagtggagactaaggaagagtacctgtagtggtagctgaaatcctgtaaaagtattagatcatgaaagccaggagaatattaagttgtaagtgattgctgttatcaaatactgtagacagatcaagtaatatgaatattatgcacctactacttttaaaaacagagaaattattagtgcctttggtgagaaccatttcactggtatagtaatcaagactttagtaagttaagatgtgagtaaagcttttcatatctctgttatttggttatctaatttctgagtttcttgtcaaattgtcacaatcagcaaataacccagtctccaaccacccccaaaatgtcccyttccagtagagctacgtgtcgttaagtcttttaagacctttgactatgaagggaataagatgagtcagtagctgtctgtggaggctgccacttattttttttaataagagtgatttttgaatattaggtgccagtagtcaaaaattgagtaaaagctgaggttgaagataaaggcagaaaatattgaaggggcatttttagcaggtggttggtgagcatggatttagttatttaacaaatcagccaaaatagcccaatgcatccatttcataatagagatgatcttgctagttacatctaaattataaaagtttactttctataaactcctgaatcctacattcattactacataagggacaaccttgatggtgaccttgatgaaatttggtatctgttgtcaggcactactcacatttcttttgacttttctctgcttccctgggtgaccagtcctttgactgatgtagtcatattttagatgtyattacattaatttttattattttcttgctgaccttgtaactataagtattttaagaatattatttaaaataacatttattttctattttgcttttactgttgaacacgaatcttatttgcattattttttgattcttggaggaaaactcaccatatctcccaagttctgagaaatcatctatagtttgttaaagaattaagagtgggctgggcrcggtggctcacgcctgtaatcccagcactttgggaggccgaggcaggtggatcatgaggtcaggagatcgagaccatcctggctaacaaggtgaaaccccgtctctactaaaaatacaaaaaattagccgggcgcggtggagggcgcctgtagtcccagctactcgggaggctgaggcaggagaatggcgtgaacctgggaagcggagcttgcagtgagccgagattgcgccactgcagtccgcagtccgacctgggcgacagagcgagactccgtctcaaaaaaaaaaaaaaaaaaaaaaagaagagtgaaagaggcaatgcttattctcatatgtcaactgtttaaagcaactggattaggaaaatattgtttagaatgaagaaacttatttataatatttattaaatattaaagaaatttattgaatgtctattttgtatgccaggagtagaaatgtacagttgaaaaactatgatagaaaagatcctttccttcatggtttatagcttaataagaggcaccaaattaaacaattataccaatactttttaatgacttctttgtgaattgatgtagagatggtatagagctcacaatcagactttatgctgcaatttctccaattatttcttggttatataaagtttgctctctggttggtgcctcatgaataactcttggaaaaatagcccttgagttcttcacatacttaattgttcatgtgtgaattcgaaacttctgatttttaactttagagccccagagttgttttttgtttgtttgtttgttttttaaactagagaatgttgcaatgctgatcattctgtgtcttttttgttttaggtatgtaagttcattatttttaattctggaaagttttcttggattatagttttctttaattattctgttccattcccttgattttctgccttagggtctacaagtatacatatattaatctcctttgcctgacctctgtgtttgtcatttactctcaagtcatttttcccttctctcctttttatttgtttcatttttatcacttttcctctgcatattctgtttctcctactgttttccacagtgtctctttactcttgtgctccttctaatttaatctgtattttctagtattattttctttctagttcttatttgtattctttcaggaaacttctcatatctccctctttttttggtcatctcatttctgagctttttgtcaagagctgtgaaggggctggaatttttaccctgcttgcaagctaaaaacttagcttgccacagtttcaggaatcagatggacaacataagactcttggatcagagctgaaagacttyataactgactagaggaaatctcctgagtgattcatagcttctttatatcagccaggacctattgaactaaactctgagactttttattgtcatctttgaaaggatctaatattggcaagttggactgtaggaggaatttagtcataaggtgccactaagacattgtttgggagatatttttgaacttatttcccttggcctataaccttttcttcttctcttcattaataggcagcaaaattaagatgactcattgcctgattgactgtacagttttgtcagaatatccactattacttctcaagcactctcctcaaatcctattaattggaccatgggactgggtcttttattctccagaaatccacgtatcttgtcagcattccattttgttgtcagatctgtcaagtactgtgaagggtctgagatgttaccctatttgcaaagataacagattagtttcatggatgctgacagatgacctgaaacccctgattcagagacagaagaaggctttattacatataacaaaagcaataaccacaatgtcccatatttgcactggttgcctgagcctcagttcccacaggacaacttggagggccagataacacctgtaccctgaatgggttgtggtaaagagaggaactgagggtcaagggcccagcactttcggagcaaatagtaaacattgtcacaatcagcaaacaacccagtcttccagccaaccccaaaatgtctgcttccagtcagaacatccttttcctcctctcagaaagagagtatctggtgttgcagtctggtgtaaccacattcttcttgttatccctttcacatcagatatccacagggaactgctcttcatctacctcaactctgttcttttgtatgagaaatttccatcacttgataacccagtgccaagatgtagaggagaataaattaccagagaatgtctagaggccagcctctatggatgcctataccaaatggactccagagctgccctgttattaccttaccatctctggctggccctggaatgrcattacagttttctgacacaatgcagtcaatggttacacccagggaagagtagagaaaggaaaagggcacagacagaaagttctgcccacccctgcttatccccgttagtgccaccaggtcttcttcagctctaggctgcacttttctgccttctcccattcaagtgatctctgtctccccaggggtgttggagaatttttaattaaattctaggatccctccttctcctttatgtctttgagttctttgaatagggtttatagtaggcaactcgcagctcaggttagtttgttcaagttccagacaagatgacatttagttttgaagacctggttcaaattttgtctcctaaaagtattctggatacactaattatacttggctattggcactaaatctcagtagaatttattcatacaggtactttaaaattcattaacaatcatattatttaacttttctgctgttcttaatttctaccttgtaggtaggacttatatcttatccttgtaatataaccccacaactttggagtaagttggtctgaaatgttggtgtttccaaatagattttaatggcaagattattttcacctggtctcatgttgattacktggacattactggaagatccaaaatgaagttgattatagaactgagatcttgatttttccatttttctctagcattatccataaycaaacttcagatatgattatatgacattaagttagccttacagtggaagatgtgccaatgtgcagtgtataaaatgctaacatttattttcttttgacttctttttatagaatcagattattcttattacaacttaatcctgaagaaagctggacagtttctagacaatttacacatcaaccttttaaagtttgctttctctataagggcatactccccagctattcagatgtttcagcaggtgcgtaaaaatacccaatctgtatttgacaaagaggcacgctagcaatgtacatagagttctttaatatgaacatctttagttcaaaatgatctacaagtttatagttggttccatagcctatcattgattatattattattgttgtcatttattataatgtaattgaatatattctgtaatttttatagttatttgggataaggaaattatgaggacaaataattgaaatgaagtatcataaaattttaatagaattttttcaataactatgaagcatgtctttcctaggataaagttgattttattaaaatatttcttagattctacctacgtatagatgtttttttactttaattagagcaataacttaatagtagttgatgagttattttaatcaaagtaatgtgtgagggttttaaaatcatattgtaattatcaactgctgtagctaaatataatctttgaaatcttagattgcagctgatgagccaccaccagatggttgtaatgcatttgtggttattcataagaagcacacctgtaaaattaatgagattaaaaagctgctgaagaaagctgcttcaaggtaaattaataatagcctataatgaaagaagtggttatagagaggagagttcaatagcagaaacttcttataataaaaaaaatttaatattctaagacattgtatattcaagaatgtgatttgtattgaaaaccgtaatatatctgagaatgttttgtcttgattagcttttgattttagcatataaattgtgccaaaataacataaaatgtatgaaatgtttcatataagcataacttgttttttgaaataaacatgcaaaactgagtttatttggcctatagctctttaaatataaactgaatatatacctggggaataacaaagtaatcaaaacaatagatgaggttgcttcctatattcaaaactatttttttgcttttttgcaagtatttaatttaaaaaatggcaaatcagaagtaaattattaatttattagtgattttttagagtaatactaccagtatattttttttgcctgattatttatactttaaraaataataaagtagtttttttaattttgaaagagctctattaaacagtaatatatatttatgcatattaatacttaactcacttgttaacaaaccatttctaacattttcttatacttgtattgaatttcatatacaaaagacttttatttttatgtagccaaattttcctgtgtatgtgacttttatattgtttttatactaacagtttttcccgaacctgattgggagattttactaattctttctgtagctttctaaaagtttttccttttattttacattaaacttttaatctatctgtaatttattttcatcaaaaggtaagaatccaaccagatttttttcctcaggtacctagtcaattgtattcattatatttatattatggtctatttcatagctctttgttctgctccattatctatttcttatagtagtgccatactgttttaatatttattgctttattatccagtttctgacaggaggatttcttcttcattgtggytcttttttcctccagaatgccttagctccttgtatttgttgatgcttttaagtcaacattggaatccttttcctccccaagctccccttccccaaaagccttgttagggtttaattagaattatgttaaaagtattggttaatttaggaaaaatttacatctgtgttgtattgaatctcttatcaaataacatggcatgtttctctgttcacacctgcttttaaaacttaaaggcagaaataattgctttattttatcaattattttttcaactattgggatggatacaaggtttttctcattggacatactaatatattacaaaatactttgaaatattataccttcttttcaattctgaggaaaactactgattattaatggtgtgggattatcttaatttgcttttgaattaagattgctttcattttgttttcatgtttctgtgttaataaatgaatagctgtacatttattgaaattatttgacatctttaatttttatcggtcattctactttcgtaaagtgaattaggcagccatattattcttattctggatgagttaatataggaattatctattcctttatggcattattagactcactataatataactcactagtgcatcttttaaaggaaattttgtaatgtttaaaatttattgtcattggtttctgatgtcaacttttataattatagaaactaaagtatcttgaagattacaaaaaaattaacatcaaactattaggaaagtccatctgccatgggccctgtgagtccttgcatgttctttcttggtctgaccagcaaaaaatgcaaggtcctgaccactctttacctgggccatttctcagggttgtgtttgcagtgagcaaccttgaggaatgaggtaatgtttgcctttgggattggggacagggagcaagtgtgttttattgcttactataaaacagtgcttccccaagcccagtgttccttaacggaaacatatgccaactctgtaggatccatctaagtccatattttgtcaccccctgtgggactttgggggcaagcatagtaacgcttatactgcttgctctatgtcatgagcagtaaagtcatttgtctttgacccaggagtctgtcttatgtcttctatcagaatccataaaagaataaaaggctaacttattagtttgtaagtcaggtaaaatcataccttagacttttacagttcttggtagttttggagactgtcatgggtgggatgttgactgacacacagcttctggaagaggaagttcgtaagggcccatgggtcgagaagaaaaaggtcaatacttacatttcttcccactgctcacctctttctccctgtactcctggtgggtgatrgtagtctcctgataactgtgttgtagtctgacacatgttccttgatctgggctcctaaggaaaaggcactcaaacttgactgatttaatggtttattgttttggctctgattatataactggtattggtattttacatgcttatactgtgaatgctgtcaatgtttgtgaagcccagagggaaactgtcattcagagactaccacacatggacacccccaggtggtccagcagaaacaacaaagaatcaatcccaggaggagaaaggacaatcacaactttgtatagacttcatagctgctggactaccccgagagactgtttctaagtacaatagtgccacctgcctgactcagccacttagtacacccctttttaaaatagcagttcttaagctcttgttgaaactgaatgcctgacccatggaggccttgtgactctaccacatgacatttacattttcacgtagttcaactaggagtcagtgtctcgcaaggtaaaagggacccaataagcctccctgctcaaatggaaattatatattcaaaagcccagcttctgggccctagcatggtatcaggtatatgtgaaaaagtggcagctactcttttgggagtgaactaaataacccatttcactacctgaagtaaggtcactggctcaaaagggccctcagttcacagtggtttccctaaatgcctgggccaggctgctgggacgtttagctaagttaacagctggtgggctcttcgggctgcctctgctaccatttcaccaggcataagccttgtaaaascaaaagctgaagtggtcactctactcagtgggcagaactcaaggccgtcatcctctccctgaacaaaatctgaccccttggttaaatataatacattcatactgactcttgtgctgttgccaatggcctacctgtctggtctgccacttggaagactacagatgggcagcttaaaaataccactccttggggcttgcacactgtgaaagtaatttgcacttgcccatctgacagtctggtttactcctttagatgtacatattatagacccattccctgataagtgtgaatagagacaaactgactatgccaagaccgtgtgaggccctgactgctctttaccatggccttttctcggggtgttttcagtgagtgactttgagggataagtgagtgtttctccctgggacaaagggcaacttacttactgcttgttattaaatgatgggtttcccacattcagtgttctttagatgtgatccatacccactgcctgtgtagaattcttgtgggtccatcatacttctccctrtggaatgtgggcccatggggaacccatgtaaacatactaatgttcatgttgcttgctgtgccacaagtaatcaagctctttgactcagaaatctctgtcttttgccagaatccatgaaacaatgaaaagctaacttattagcttgtaagtagggtaaaacaattctacagcctgacagaaacattcccccccccmcccgctatgtagggcaaagttaataattttttttttcctttygtgaacttcaggcatatactcttgggtttgtgatatcttatcaatattggtcaatggtttttttttcttatttaagcatataatttatgtttttacataggttatgtatagtaatataaatattttaattttttcctctctgtagatatgtttctccttcctagattttctttagttttcattttctttcagtttttccagattaggtttttatctttttttaaagaaatgactgataaattttttctgcttttttattctaataggttttgcatttatgtattttcttctgtctgtggttgagctaaacacttggttttttgtgttttttttgttttttttttcaattataacatatttaggtcatcaatgttgcctttctttactatgtgatattctcattgtcccaatttcgtaaaattcttcttaacagtagttttatttacatgttggaaagtagagtgaccactgggagaaagttatactcatttaggatggtaatgattgctgtcactttcccccagatatataactcatattttattttgttttatttatttatttttttgagacaaggtctcactctagtgcccaggctagagtgcagtggtgcagtcttggcttactgcaacttctgcttcccaggctcaagttgtacttctgcctcagcctcctgagtagatgggactacaggtacaaaccaccatgctcagctaatttttgtattttttgtagagacggggtcttgctatgttgcccaggctggactcgaattcctgagctcaagcaatctgcctgcctcagcctcccagagtgctgggattacagacatgagctaccactcctgatcttcattcacattttcgtattatgtctataaagttttggggcagttccagaccatagatttttgaaccagggaataggaaatagggagagatgaagaatcagtttactattctttttttactagcatgttcttgttctaagtggtagttgactgtcagttatgattctaagttgaacagcataggttttatagttagtagactttactcccaatttatgtatgatacaaagttatttttagtttgcaacttcattaagaatttttgtatctgagtctttgtaaatatttttggagatactgtaaaatttagtgtcagggactgctctccaaatgccacttcaaatcaatatgaccatcttttttgtggctttaaacttttgtcccaaatggaaagctgtatgtttaaagttaaaaaaatcccatatggtcattataaaagaattcaaatactttagaaaaatgcaaagtagaaagggaaaatggcctataattctgctaacagtttagtatatgttcttttttaatgcmtatatgcatatacagacatacttaaaaaaacatttattgtactataaagggtatcttagatccttctcccacaaagttattgtgttcttacatgtaaataaataaaattactggtatgtaccgattttatgtgttaggctgtttttgtgttactataaagaaatacctgaggctgggtaatttataagtaaaagaggtttagttggtttatggttctgcagtctgtacaaacatggcattaacatctgcttggcttctggtgagagcctcaggaaccttacagccatgacagaaggcgaagctggaacaggcacgtcacatagtgagagcatgagcaagagagtaaggggggcccctgggaattgcatttcaacatgcgatttggaggggacaaatacccaaactatgtcattcttttcctagcccccaaaatctcatgtccttctcacattgcaaattacagtcatttcttccccatgtcttaactcrttccaacatcaagtccaatgtcctaagtgccatctgagactcatctgcttccacttatgagcctgtaaaatcaaaacaagttatttacttccaaggtacagagatggtgcaggcattgggtaaacattcccgttaccaaagggagaaatcggccaaaagaaaagagtaacaggccccatgcaagtctgaaacacagtaggcaggcactaaatcttaaagctgtcatgtaatccttgactccatgtcccacatcgtgatgtacatcctggtgggctccctaggccttgggcagctccagcgctctaactttgcaggatacaacccacgtggctgctgtcatgggttggggttgagtacctctgggttttccaggcacaaggtgcaagctgctggtgaatctaccatccttggttctgaagggttgcagccccccctccactagctccactaggcagtatccaggtggggactctgtgtgggcgttccaaccccacatttcctctatgcactgccctagtagaatatctgtgggggccttgcctgkgtggcaggctcctgcctgggcaccaggcttttccatacatcctctgaaatctagatggaggcctccaagcctccttcatgcttgcctcctgagcatctgcagacatgagaccatgtataaactgccagggcttatggcttgtgccctctggagctgtgacctgagctttacctgtgcccctttgagccgaggctggaactggagcagctggatgcaagttgcaacctgctggcatggcacagggcagtgagcattctttccttttaggccttggagtgtatgatgagaggggctgcctcatatatctctgaaataccttccaggccttttcttcattgtcttggctgtcagctcctggctcccttttagtcatgcaaatctctctagcaaatggttgcccaatagcccacttagattcttcccctgaaaatggactttttcttttctggctagggctgcaaatttttcaaacttttatgttctgcttccctcttaaatatgaattccaacttaaagccatttctttgctcctacatctgaacatatgttgttagaagcagccaggccacttcttgaatactttgctgcttcgaaatttcttccaccaaacgtcttaagtcatccctcttaagttcaaacttccacagatccctagggcataagcacaatgcagccaagttatttgctaaggcataacaagggtgacctttactccagttcccaaaaagttcacctaccatgtagtagatgctgaaaaatattgagtgagtgataccgtaatgaaatgaataaataagtttcattattccactccttgcggtgtatatataggtagtttacagtaaacaatatctaattgaacttccttgtacatatatctttgcatagttaccttggttattttcttaaatttctagaactaaaatctctaggtaagtacatgtatattaaartgtatactacaaaattgtcttcagaaagctgaagttttatactctacttctaaaatttttaccaatgctaatttgtattaattctctttaacaccttagtcaattcagtaaattgctacttttaaatataattatttaattttcaaagatcattttcctcttatccagccatcctctataggtataatttttctacctatgatatatccaagcagttcctgaaataatcataaaagcaaattttgaaagttatgtgtctataggtacaggaaggaaggtactgtcgattacagactcagcaaatggtagagagcccttacctttgtgtgtaaagtctattccatttcctctaatttttccttttatattcaacctcaatatttatctcctagcatagttttattggcagcctttctagttttctttctttttttttttttttgagacggagtcttgctctgttgcccagactggagtgcagtgatgcgatctcggctcactgcaagctccacctcctggattcatgccattctcctgcctcagcctcccgagtagctgggactacaggcgtctgccaccacgcccggctaattttttgtatttttggtacagacagggtttcaccatgttagccaggatggtctcgatatcctgacctcatgatccgcccacctcggcctcccaaagtgctgggatttcaggcctgagccaccgcgcctggccgcctttctagttttcaacagtagtaaattctttgaaggaagaatttttcaggcttaaattaaaatttaagattccttatataaattactaaatgtacttctatgatactgatttgataaaatcaggtttataaaatgataatccagctgctatataagtgacatttgagttccaagatttcagttaaaatttatgagaataattttaatagtttcatgcaagaatctctttcacttctcttttcaaagtgaagtatgattttgtatccttttagcatttattaatagcctctcatgaagaaagacagcaaattcagtgtctcttgttttgcacattcatgtctcttcatcggttacagaagattaataatgaagtgaaattctatttggggttaagattctatttactttatgcttcagctgtccaagcattgacagtagtaacatttctatattgctgttgagtaatggcacaaattctaagccaaataactgtggaaatctctcaaattattctgttagtcaataagattgaatgcttgaatgattttgatttagaatatgttgagtcagtaagtagttaagctagaattgaatccaattctgcctgatctcaaaacccaccttcttttcactaacgtgctgtaggaatgttactcataccttttttcttctgtccttaatatttgttatccaaaggtagtaattgactgaatgattgtagagatcagaattcactaaataaaaggttatttctcaacatccttgttactctgaacttccttatctcttggtttgctttctacctgtataaattgccaaaacatatgggctttggaattccataaacatgagttgaaattctggctttccatttgatcttttcctgaatagttaacttatctgagcctcagaaacttaaaagtttcagtgatggtagctgtctaatttttcttgtgaaatagaatttactaataagtgtaaagaacctagcacagtgcctggcaaataagaagtcagttaaagtctgtttctgatgataatgctagaccataagagtcctggtttctttgcttatacttggggatttgatgagtacttgttcatactaagtactgatagtctttgaataaggtagtacttttgctttgtgccttaaatatttataccttgttttcaggaaatatgagctgtaatgaaaaattataacctaactgcataaaatataaattttatttcactgaaaattgtgctgccattatatgttattgtttaaagataataaaccttgttgggaaataaagtatttttaatattagatttgggttaaccaaattcttttctttcttttctgtcatttagttcaagttatgtgtacaaagtcatcacaggaaatttaaattctttttctgtgattatgtatattatgaattgtttgataagcagtaattatacagaattgatatgccattaactttcagttttttcaaaactttgtgttttgcttttatcttaggactagaccttatctatttaaaggagatcacaaatttcctacaaacaaagagaacttaccagtggtgattctctatgccgaaatgggtactagaacatttagtgcatttcacaaagtattgtctgaaaaagctcaaaatgaggaaattctgtatgttcttcgccattatattcaggtatgcgcttgttttttccaaggttgcttttggctgtagaaaaaaacaaytattatgataatcgtcttactagatttaaatattaattttcaccagaatagttatctaactttttttaacttaacaaatgtgaatttcatgtggaaaaatatattgggattctgtctcttstgggggtatgatgtctataattctttgccttatatctggcacaaatttaaaacttggataaaaaacaaaaacatacttcaataatgtgtataatatttgctaagaatttgcaattaagaaatctgrtttactcaacatactgataatatatacagtactagatcaaagtgcaaagcatggtgttggaatactgttaactctttcttttgagacctgactacttttcattcaggtatctggtrtgtgctgtattgttcccgttcctctagcctgccgttgctatgacactatcacatttttctgttttaatgatttcatagcacttattactgtatctcctcaagtttatttaacactttcagagcacatacatgcacacacacacacacacacatgcgtatgaatataatggccattagaggaaggactatgctttgttactactgtcttcccaacatggagtgctttaatttgcatttcccaaattattaagatttatatactaatatttaatctrattaaaaccttaaaaatatatttgtaaattgcctgtccgtagcctttgcctatttttgaattgagattctttttttctcattggtttataggtgtttttaatatattttgaatactaatattttcttccatacttcgcagtatcttctcctagtgcatttctggtcttctgattttttttaaaaattgtttatgacatcttttacaaatattacttgtgatatagtcagatttactcaactttacctgaacgatttcctttatgctgttataaggacattctcttgtaagagttgaagttctattttttgttttggtttttaatccatctggaatttatttgaatatactacggggtagagatataattctgttttttccatatgaaaaattattggtcttcacatactttgttgaacagtcaagtctttattctactccatcatatgctaatttttcatatagacatgtatatgtttttagactttccattctgttgcagtgatatatatgtctattctacacaaaaataacatcattttaattgctgtagctttaaaatatattttgatatctggtagttcaactctgcttcttaatttttgtttttctaaataccttggctgttcttgcatgatatgtagccatgttaattttagaattagttggccaggttccatgaaacatgttgggatttcatacgggaatgaattggacctttctgattaattttgaagagactttttcttcatatatattgagctttgccttctatgaacatatttttatttcacaatctagtcagatgtctttttgaaaagtatcatctgtgatgtacaatgttgggtttcaacaatcacacagagtcatctgtcagtcaccttagtaccatcatattcacatacagattcttgtaggaacatatgttttcaattcacttggataaatgcctggaagttctattgctgagttgtatggtaagtcagtgtttaacttcataataaactataccaaactgtctctcaaagtggctgtacaatttttcattccccttagccaggaaagataatttcgctgctctaaatcctaaccaccatttgttaatgtcagttttttttattatagctgttctaggtacacagtggtatctcattgtggttttaatttgcatttctctaatgactaatgaagttgtctggcttttcataagtttctttttggtgaactttttttgtttagttttcagaattctttttatgtcctagatataaatcatttatgagatacatgatttacaaacatattctaccagtttgtgaattatcttgtaattctcttaatgtgttttgcagaggaagagtttttaattttgattaagtccagttcatcatttttttgtttatagattatattttttgtattatatctaaaaactcatcaccaatctcaaggtcattcagattttattctaagcgttttatagttttatgtttacacataggtttatgatccatttaaggtttgtgcaacttgtgagatagatgttgagatttatttttctacwtatggatatctagttgttttaacatttgtttaaaagactgtccttctccattgaatttcctttatccacttgtaaaatataattgactgtatttgtatgggtctatttctggctttgcttttctgtgccattgatctgtctgtcccaacatcaatactacactgcttgattactttaccttgatagccttgagatcaggttgtgttagtcctccagctttgttattctttttcagaattgttttagctaatctaattcctttgtctcttcttgtgaactttaaaatcggcttgtctgtatctacaaaacattttgctggcattttgattgagattacattgaacatataaattaaatttgtgggagaacatcttaaaaatattcagtcttccaattgaaaattatgtctcttgatttatttagacatcctttgatttctttcatcagtgtttttcttctttttcaacctatatgccatttatttttttttaaccttattttaatgattaagacttctagtcaatgttgaatggggagtagtgagggaagatatccttgcctttttcctgatttgcagagaaagcatttggtcttctactattaactgtcatattagaggaagggtttatttttaattttttaagttctggtgtacatgtgcaggatgtgcaggtttgttacataggtaaatgtatgccatggtggtttgctgcacctatcaacctatcacctaggaattaagcccggcatgcactgtgtagtatttcgtggtgtatatgtaccacattttctttatccattttactattgatgggcattcaggttgatttccatgtttttgctttgtgaaaagtgttgcagtgaacatatgcatgcatgtgtttttatagtagagcaatttatattcttctgggtatatacccagttatgggattgctgggtcaaatggtagttctatttcaggttctttgaggattgccacactgctttaaatgaactagtttacagtaccaccggcagtgtatgtgcattcactattttctgcaacctcaccagaatcttgttattttttgactttttaatagtagccattctgactgatacaagatggtatctcattgtggttttgatctgcatttctctaatgattagtaatattgagcatatttttatatgctttttggccatatcatatgtcttcttttgaaaagtgttcatgtcctttgctcactttatttatttatttattttagacagagtcttgctctatcgccaggctggagtgcagtggcgcgatctcggctcactgcaacctccgcctcttgggttcaagcaattctcctgcctcagcctcccaagtagctgggattacaggcatccaccaacatgcccggctaatttttgtatttttagtggagatggggtatcagcatgttggccaggatggtcttgatcttttgacctcgtgatccgcctgcctcagccccccaaagtgctgggattacaggcgtgagccactgcgtccagccttcgctcactttttaatggggctgtttattttttgcttgtaaatttaagttccttgtagattctggatattagacctttgtcagatacatagtttgcaaatattttctcccattctgtaggttgcgtgtttactctgttgataatttcttttgctgtgcagaagttctttagtttaattaggtcccatttgtcaatttttgtttttgttgcaattgcttttggtgtcttcgtcatgaaatctttgccagggcccatgtccagaatggtatttcctaggttatcttctgagggtttttataattttaggcttcacatttaaggctttaatccattttgagttgattttttatatggcataatgaaggagtccagtttcagtcttctgcatatggctagccagttttcccagcaccatttattgaatagggagttctttccccattgcttgcttttgtcagctttgtcaaaaatcagatggctgcaggtgtgtgacattatttctgggctgtctattctgttctgttgctctgtatgtctgtttttatgccagtaccatgctgttttggttactgtagccttcagctttgttctttttgcttaggattgccttgactattcaggctcttttgttccatataaaatttaaaatagctttctctaattctgtgaagaatgtcattggtagtttgataggaatagccttgaatctgtaaattgttttggcagtgtggctattttaacaatattgattcttccagcctgtgagcctggaatgtttttccatttgtttgtgtcatctcttatttccttgagcagtgttttgtattaataattctcattgtagagattcacctccctagttagttgtggtcattagtattttatttttatggcaattgtaaatgggattacattcctgatttggctgccagtttggatgttgttgctgtataaaaatgctagtgatttttgtacattgattttgtatcctgaaactttgctgaagttgtttatcaggtcaaggagcttttgtgcagagactatgggattgtctagatatggaatcatgttgtctgcaaacaggtatagtttgctttctctttccctatttggatgccttttatttctttctcttgcctggttgctctggccaggactttcaggactatgttgaataggagtggtgataaagggtatgtttaagttccttatgtattctgatattaatcccttgtcagatgggtatttgtcaaatattttctcccattctgtggattggctcttcactgtgttgattgtttcctttgctgtgtagaagatttttagcttgatgttaactccacttgtctatttttaattgtgttgcctgtgcttttgaagtctcacacaaaacatttttgcycagaccaatgtcctggagcatttcttcaatattttcctctagtcgtttcatagttttgggtcttatatttgagtcttcaatcaattttgatttgatatttgtatatggtgagagatagtggtctagttagtttcattcttctgcattatggttgttcagttttcatattgaaaagactgtcctttccccagtgtatgatcctggcatgtttgtcgaagatgagttggttccaaatgtgtagatttacatctgagttctctattctgttccattggtgcatttgtctgaatatgaattcttccatgaacatggaatatctttccattttttggtgttctcttcgattcctttcatcagtgttgtagttttctttgtattaatgtaggtctttcacttttttggttaaattaattcctaggtattttatattatttgtaactgttgtaacattttcagaatgttgtttgctatttgtgtatataaatagtactgaattttgtatattgattttatatcttgcaactttactgaattcatttattggttcaaacagttttttggtggagtctttaggtttttctaatataagatcatattgtttgcaaaccagggtaattttacttcttcctttccaatttggatgtcctttatttatttctcttgccttattactctggctaaggcttstagtattatgttgaataaaaatagtgaaagggggcattcttgtcttgttccagatctttgagggatggctttcaattattccctgtttccatatgatattagctgtggatctgtcatatatggccttaattattttgaggtatgttccctctatacctagtttgttgggggggagggacttgtcagaaagagatgttgaatttygtcaaatgccttttcagcacatatttaaattatcatatggtttttgtgttcttggttcttttaatatggtgtattacatttatcgatttgtgtatattgaactatcctgtatccctgggatgaatctcacttgatcatggtgcatgatctttttaagttgttgctgaattcattttgctaatatgttgttgaggatttttacatctgtgtttattagtgatattggcatatagttttctttttttgttgtgtccttgtcttgttttggtattgaggtaatgctggcctcctagaatgaatttggaggtgttctctcctcttcaagttacagagcagagttagaatttccaagactggggatggcagtcctgcctttcctctttgtctttgtcctgaggcatatttctccctttagacactcatgatgtttcccatgtgtggtactatcccacagctcctgagtgttctgctcagtttcttgctgttgtttgctttttggattttttcctttctttctctactacattttcttcttaaattcaatttgaataatttctattgacctgccttgkagttaaccaattctttttttttttttttttttttttgaggcagaatctcgctctgtcamccagtcttgagtgcagtggtgcaatctcagctcactgcagcctccgcctcctgggttcaagcgattctcttgcctcagcccccaagtagctgggattacaggcacacaccaccatgcctggctagtttttgtatttttagtagagacatggtttctccatgttggtcaggctggtctcgaactcctgaccccaggcaatccatccacctcagcctcccatagtgctgggattacaggcatgagccactgcacccagccagccagttctttctttggctatatcaagtttacttgtgactctgttgaaggcattctttatttctgttacagtgcttttaatttctatcattgccatttggctccttcttacagttttaatatgtgtgatgaattttcctttctgatcactcatatgttctacttttttcattagagcatttaacatgttaatcattattttaaattccctcctgaaagtttcaacttcttttttacatctgattttgaaattgttgattgatttgtctcttcagacttttgttccattgacttcttggacatcttgtgattttcgttgttattaaaagctcaacattttgtgtaggagccttgaccctgcctttagtttaggccatgcctttcatgtatgcaggattgaggtgttctggtcaggagttgggttgggtttcacgtttgtgttccacttggctttaggtctccccacttagatttggatcttccctttgtacagctccccaaagacaatgtgtttcttatagctttcccacctgtatttcagcgttatctttactcaacccttgttagattggccttgaggtgaaggtgagggggcagctaaggaaggggatattctctgatgttccaattaagtttcctttctaggcatactgtaaatttgggcctcaaggtttctgatcctctctcagaatgttgggcctggcaggtattcccgtccttccttcagactaagactttcatctgttccatttctcccgtcttcagtgggcttccaccagtacactatatagctacaattttgttgcccttgcctctgaagattaaggctttggttctataggggagataggtctgaagtggatttcagcagtgatttttctttcctctctacctgtcaccattagagtggaagctttctcaggaccttccccagtcttccctgtgcaagagggtttcagccttgctatgtctggagctaccaggggcttcacactctcacgttagcccacatttagcctttagcaagctttatagatttctagctaaatatctttaccagcttcactagcatttggtggtatctgtcctgggtattcaaatgttcaccttcccacaggtgcctttttcttctgttatcattctcgttccttctgctttattttttcttcagaaaattttctaatacaaaaagcctaaaaataataaactttttgtatatrctacccagaattgacagctaacattttatcttttcaagtttattttttaattgaagtaataaaactttaaaaataaagttgaagattattttgttttccattatcagtctcattctctaccccaacaccaattggagtgttcttttaaataataaagtgctgtcactcctagagatctttcttcgttagrtctggcacattggttgggaatatatagcatatgattctgaggccctctgatatcygtccactgaagaaagagaaagatgagacattctagttctgagagaggaggtcataactaggtggctgtttaataaggatacaatgcttataaaattatttttccttgttttgaaacatacaataaattatttttttggttttattacatttttttctgttctttttttcatttattattattatactttggggggaggggggagggatagcattgggagatatacctaatgctagatgacgagttagtgggtgcagcgcaccagcatggcacatgtatacactaacctgcacatatgtaactaacctgcacattgtgcacatgtaccctaaaacaataaattattaaccatagtcactcgattgtgctgctgaacactagatgttattcttcctaactgtatttttatacccattaaccatcccctcttaatccccacatccccactagtttttccatcttctggtaactaccatcattctagtctctgtctccctgacttcaaaaattggaatgttcctaacacaaagaaataataaaatgtttgaggtgatagatatcccaaataccctgatttgatcattacattttgtatgtttgtatcaaattataacatataccccataaatatgtgcaacttttctgtatccataataattaaaaataaaaaattttaaaaacaaatatgttttttttttttttcctagagttgcttagataccatagctttgctgcttacctggggatagctttgctgcttacatggggaatccaaaatttaagtttcttagtgctgattgaagctatcttataacttctgaaagcagtaatatatgattgtagaggatgaaaatctcttaagttactactatttatgaggaaactaggtattctttgaattagaaatttgttagaggaatctgtcatctcttccttctttctttcctccatgcacatttattagatgctgtgtctgtgtctgaattgcyttgtaacaaatcttctcaaaatttagtggcttaaggaaatattgacttactgtttctctttattctgtgggttgacagtcggggcactttttctgctggtattgttcatgcagtgagggtcattcagtactagattagagcttggggattcaaattattctgacagacctgtgtggcagttcaggctgatagctggagtttcttgtctttttctacatggcctttcatcttccaagagttagactatgattcttcacatcatgatggcttagggtcccaaaaagaaaagagtagaacttgcaatacctcttaagccctatgcccaagaactcatacagtgatacttctgccaccttgtgttagtcaaagcaagtcacaaggccagccagattcaaaagaatggaaaaatagactcaatttcctggtgagaagtagcaaggtcacattgcaaaggagtctggacatgggaaggagttactcatttgtggcctttataataatcttccacaaatgcctrtaatttgggcactgtgcttagtactggtgatagaagataagtagcttatttcagtatcttaattttgttttatatatttgataattttatgatgcaggttcactgtgcactggtatcaatcccaggggaggactgtaaacaccttgccaatactgtgtaccagtatcaatccactggcatgagtctggtgagacagaacacacaataagtttagggaagcaactttattactcacagacaggcagcaagggacartagacacctaaggattcatggcaagctcatcccccaaagcttaggatagctgtccaggatggatggagtctcacgtgcacgtcattcatgttgcaccgcagctraggaactctgaaagcctgctctgccctgggttttatacctaggagcaacttgatgagctgtgctaaagcattgcaagacatcctgttctaggagctatgggaacagagcttggctttactggcaattccttcatatttcttgcatttccagcacatcattctacagttattctgagatttacaagtgagaaagcgaggaagagctgggttgccaagatcttttggggacttgccctacaataacatcatataaaatgtgttttttccctcagtgttcttcacattctcaattttaattgttcattgtataattttgagttagttattgctatttagtaaaagtggaaaatcttaaatattcttgagtgtgttggcatatagatatttgcataatctacataaagattatctgtaaagtgagatgtaaagagaaagtgtgggtrtgtgtacagtttgtaaatgattacatatttaagtcattaatttcataaatatttggatgcctctgtgccaggcattggttcatgtagcagtgaataagagagaaacattccttattctcagagaacttcaattttagtggcaagagatgtaaaacagatttatgttagatggtgatgaaagtgttttcagaaaagataaatataaaagaagaggacagagagtcatgggtctagagtgtgcactcaaaacattttatattgtctaatcatcttatgccaagaattctcaatttttcccaactgagtttgctagaaggatggatacattaccatcaataacagtagcaccttaagactatgattctctgtcagataaggcagagctgagaggcaaatgagaataggaacgggagtgggagatacaagtacagtttacccttaagcatgtgtgagttagagatactgacccctcatgttgttaaaaaatatatgtataactttggactccaytaaaacttaagtagtaataacctactgttgactggatgccttactgataacagaaacagtcaattaacacatatttttcatgtcacatgtattattctgtaattcttacagtagagtaagctagataagtaatgttattaagaaagtcataaggaagagaaaatatatttttcattaaatagaagtggatcatcataaaggtttttatcctcatagtcatgttgagtaggctgaggaggaaatggaagaggagaggctggacttgctgtttcaggtggcaaggtgggagaaaatctataagtaactgtctataaaagtagatatctataaaatatctgtttcttgtaaaaatttataagaaaatctgtaagtaaacctgtgcaatgaaccttgttgttgttaattgtctgtgtttgtcttttttaaatgttctcccaagtggttctaacatgcccctggggagctatgcccatctgttgtgagaatctgtctcaagttattatttagagtttcatgcgcgtccgtgtgaagagaccaccaaacaggctttgtgtgagcaacaaggctgtttatttcacctgggtgcaggcgggctgagtccgaaaagagagtcagcgaagggagatggggtggggccgttttataagatttgggcaggtaaaggaaaattacagtcaaagggggtttgttctctggagggcaggagtgggggtcgcaaggtactcagtgggggagctttttgagccaggatgagccaggaaaaggactttcacaaggtaatgtcatcatttaaggcaaggaccggccattttcacttcttttgtggtggaatgtcatcagttaaggtggggcagggcattttcacttcttttgtgattcttcagttacttcaggccatctgggcatatacgtgcaagtcacaggggatgcgatggcttggcttgggtttgggctcagaggcctgacatagagaatgtgaccattaagtgtgcttctgtgaaatcatattaactatctgggcatttagtaacatcaaattatagccttatatttaatgaatgacatcttttatgttcaaaataactataatgtaaatctagtcaacatgtaattctaataaaaatagacatatttatgctacatttttaacatatgcctttttgtgggggaaatagaaaaacaaagatttttttttttaacctgttgatttggtagtttggtttgcaaatccaaacttactaaaactacaaaattacaattcaaattttatatcaacacacttccaaatgaggaaagtaaatatgaatttaggaacatttttattactgaggagctaataactttccagaactgataatggaaattggctatgtgaaattgcatttcttttatgaactataacaagatatacggccttatagtttcgattcacttagccaccaactgattggtcttttgactagatattcaaaatgtagttttaaattgagctgttatgaaattgaaaactctaaaaaattttcatctttgtcagattactgtaattagaaataacccagtttctacatgctatctttcatataatgtgggcctgagaaattagcaaattaaattttagtgtgggcagcaatgttaagtatttgtctgaatagctgaagctaacttttacatattcttacctggaaatagaacaggccaaagaacagtcactctggccatatacatatcaataaggcttggtagaaagtttagggaggaaagaagagaatacaaagaataacacactactaaagttctccttccctccaatctctaccttttcctctatcatgcaaaactgtccctgtgcaaacctgaattaagcaaagacacatggcttcttccagggagtttgctgagctctaggttaaagttgttttctaaccccttgagatgtgccaaatgataatggttgcagtacagccaacaagaatttcagtctggaagctggaacaactttaaaactattatgtgtgttcatccaggtttcttccttttgaataaaatatggtgacttctcttgtttgatgaggtaatctctaggagtacatttaatatttgccctttgtagaaagaataaaataaaggtactaaaattctgatcataaacatttcagaccactctgttttagtgaactgtagccccttattgcaagaacagatrttaatttgtggcatttggtatattttaatcattgagaaacaaagaaaacttttatcaggtatttcacggcactaactttttttgtctcctttgccactactttccagtgtttgcttttggcagcactctagtcctacatctagacaaccagcaagtgaagaggatttttggtttagcaaatcttttgggggtccccaaaaaggaaaacagttttgttgaaacttgtctgttattggatcctctgtttaattaactcattgaagacatgttataacaggaaaagatcagatatttattattttaattgtaaaaattaaaaagtaattaaaacagtagtcatgacaaagtttttacagagtagtcattaaccaaattctagttccttgatagactagagacaatataaacaacccccaaatttttcagagtgattaaaaaccttcaatattagtaatttacccttatgtccaaatacatcgtggtactgactttaaaacaaaatgtttgactaactcttttcgctttttataaaataaatgtgtttgaacagaaaccaagctcacggaaaatgtacttatctgggtatggtgtggagctagcaattaagagtacagaatacaaagcactggatgatacccaagttaaaagtaagttctctatctcagtacttgagtagaatgaaaagttggaggcttttacatactttagtttttyaaaaatttaatgagtataatcctacatatgttcatttgaggctagagatggggtggacatattcttcattaaaatttggaattaaattttcagctgaaagaaatgtatttaatattattggttatcaaaatttctttaaaaatatgaaatcgtatgttattttgctgatacccgatgggctcccaaccatttcagcaccatgtaacaattgatagtatatgtaaggtacactgtggcaatagatgaggctgattattgctagaggtgactggcataggcatctgggtctcgcccatgtaaggaagttttgtctgaaatatttatttgaaatgaaattaggatggtagtttttttttttctatcctgaagcaggatgagagagtcctatgaattgtttagatgaagtagattcattagatttgtgatctactaaccaatatctatctgtattttatgaactaaatgcatactctagatgaagagactctgaagacttaaataaactaaacaagttctcagaacacttatggaagtcttttattacctggttcatgtcaaatttatttatgcctgattcttggtcaagagttttatgtttattctctatatgcactcagatgaggctcctgcttcaactttgttttttcatatagaggccctgccttgatcacagacttctctctggctcctcctactgaatgtgcttcagataaagatcgtattactgtaatttaaatatttttggttaaagagttactgaaaaagtatagtaaaaataatactctgattttatgtatttctctatagcttgtgtatagctctacaatgctttataatttactctcttgtagtcacgatagcaatttaaggcatttttagctttaaaaagtcagatggtcacatatgtatcatctgtattattatgcactgcattctgtcatcaaccttttacacacacttggaatatgtcttcgcctgtcaattctagttgccactccttagtgcagttctttttttctctgtatacatgtatcagacctttaactagccatctctctgatcttaggtcttcagtgcccttaatctcaccacccctcaaaacagattaatcaatctaatctccacagtactttccaaatgaacttctgatgttgaaaatctgactttgtgattccactggttaaatcctttagtggctccctataacctctctcaaaaattcagaacatagcaaacaaagcttttcacaatctgatttcttactgcctttttackgtccttcagccctctctaatttgtgtcctcttgcctgaaacactaaactacttactatttagaataattttctgttccctggatgcttttatgcatgggctccatgggaagtctttatgacctctcctacattcatcccttagcatatgctgttccttttgcctaccgctgtcttcacttctttcatttcttctaaagacttcacatctttttcttttttttcctgagatggaatcattgctctgtcacccaggctggagtgcagtggtgtgatctcagctcactgcaacctctgcctcccggattgaagcaattctcttgcttcagcctcctgagtagctgggattacacgcgcctgccaccatacctggctaatttttgtatttttagtagagacgaggtttcaccatgttggccaggctggtattgaactgaccttgtgattcacccacctcagcctcccaaagtgttgggattacaggcgtgagccaccacacctggccagactaataaatatatcagtctgtgcctctgagatggctgcctatcttgctgctctgttagagaatgctcttctcttttctatatcccatatctttctgtgccttcttttagaaaagttcatggtctgtattttttgtgtctctgttgttcttggtgtctatcctgtcatagacacctcatagtaagcagtcaataaatgtttgcccaatgaatgaatgaacaaacaagaggaaaaggatgactagatcaaagtacccagggttgcttttacttatagtcctagagattcagagtctcagaaaagtaagaaagagtaagcgtaattgctgagctctgataaactctgatagagagccaccccacacactataagaggtcacagtctttatgatcctaaagcacccttcacatattacaccaaccagactgtatagtataattatttggtatgtaagggagaagggaaatgactataaaatattatatctttattctttgagaccatgagttttggtgtctttctaaatgttccttgattatctttaaaggtgttggaaatatgtaggaactcatatttaaacttagggtttggacctcctgcctcacttaaaagctaaacccagcatttgttacaggccttttggcttatttctgattatgaaatagaacttgactattaactaatctataaagcactttattatagttgctaagtatttaatcaagcatgttaaaaaagatagctcacacttaggaatgttagcctgtacacatgcatatatatgtattaatctggtccatgaaggaaaaacaaggtaaaacgaatggaatttcatttcattgtgagttctaatttttttttttttttttagacacagtcttactctgtcacccaggctggagtgcagtggcrcgatctcagtccactgcaacctccacctcccaggctcaagccactctcctgcctcccaagtagctgggactgcaggcgcacaccaccacacctggctaatttttgtatttttagtagagacaaggtttcactgtgttggtcaggctggtcttgaactcgtgagctcaagtgatttacccacctcggcctcccaaagtgctgggattacaggcatgagctgccgcacctggccaagttcttctaatttttgattacatgttcttttcccagtctgaaaatatttttgttgttttttggttttgtttccaaaatgtagctgtgactaatactactgtagaggatgagactgaaacaaatgaagttcaaggatttctctttgggaaactaaagtaagtctgaatggaaatgaaattggtattattatacccattggtttttaaggaattaatttgatatactgttttgccatatgcttcacctttcttttatgtagaaagtacaaacacacacacatacgattgtttttatttattacagaagtaacacatggctaatgtcaaaaagctacagaaagcagaaaagcacatttaaaaataatcactaatttcacaattaaagagataactcataatgttttggtgtacagtatgtttttccagtctttctgtgaatatttttatagcatcaaataaatgcatacacaacatattgttttgcacagtagaaccatagtgtgtagctgttttttycacatcttgtggatagtccatcatttattgaaacagtcccatagaacaggactttaaattctttccctactttttcatttaattttttttttgtgtaccagtttgtgtgtattgcagattttccttagcacaaatttcaggaaaatagttgataaagtatatgtgcttcttgaaatttttgattcatacttgtaaactaccctcataaaattgtactaacatggacactcaccccagaatgtgaaatgtgttcayttcccagaactttaattaataaccactcatactatttttaaaatctttttcagtttaataaatgaaatgttgtttctttttttaaaaaagtgtatttaattcactggattgaaccaattttataatttgtctccaagaaagtcaactattggcagtctattattgcaaggattaactttttttcatgtttattggccttggaatttcttcttgagtaaattgcttattcctaacttgtgctcatttgttcttgctgtgtttatctttttttactrattataacagctctttataaaaaattctgaaacctttgccacatattgaattacttactgtcgaagtttattttcatattaatcttaaagatggaagtttttttcattagatacaactgttatgtttacattgagagtgggattttatttctgaaactctggtggtatccctgggataactagaaaatttgaaatttaagactttcgatacctatggttggtaactgttaaatatgcatgtttttctccttttacccagaataaattatttgtcccataaataaagttcatttatagaatggctaaacctcaaagacatgaaacaacaaacataaggcaacaaataaattgttaaatatttattagccttgtagcattttttgatcctgttcttcatttgcactatatggtgctatcaccatacaaattatgatttcccatattcgaaagtagtacttttctttattctaacacagctgccataaaagtcaagtaaataattggtatagtacatacttgtttaggaagtttttaaatttggagagaaaaaataatataatttagtaataaagcattttaacaattcatggaatataataagcattaatgtgtttgttaaacatgaataaaataaatgaaaattataattattaagttattatttattaaaatagtttcacaaaatgctgccaagaaaaaactgcctaaattgaatttcttttgaggaaaaaaattaagtaaatcattattttttaaaataaatattgtaataatgttagctaatatttactatttttaaactcagtgttatttttactgttttttaataaattaacttggcaagctgtggtaaatattcctctttattatattggtttctttatttttagggagttctaatacatctgacattcataaagtatgagatacttaaaatcacttttcatatgataaatttgacttagtgtgcttagagaaacaggagttgataaagttctgacagaaaactaaaaactttatagaatctagaactttactgatctaatgagttacaaaaatcattgataatattggacctttagcttgaacaaatgtatagccccaaagaaaagaaaacgtttattactcaaattttctgtactacagattaccatttcatatacatatataagtaagctttcaaaaattaaagttatacccccccctttttttcctgccacgctgattgaagacaaggaatagcatggtgagtgctctatgaatactcatgaatggggatggctgtaatttcatgtacattttcccttatttacaagtgaaagtttatgatttctttatccaggcaaaattaattaaagaaatatttttattaacacctttagttcttgtttagtattacagtcatttatgaaggactctcagggtggttctcctggtgatgagtagataactatagacagtaaggataagatttttggagactatgctaatttatatggataactatgttacatttttaaagtatgttggccagtcagtatactctagtggccttaaaatgttaatacagcttacaaaatggttttattctaagtaaggtatttatttagcagctaacaatacatttttatcccattttcagctatctcaacatcttggaatttatagttcttttctcttttgaatataactttttatgggattaaattgcattttctccaaaagatcacgtggaacactgggctattttaattttaatttaattttattttatttcaacttctattttagattcaaggcatacacgtgcaggtttgttacatggatatattttgtgatgctgaggttaggggtatgaatgatcccatcacccaggtagtgagcatagtacccaacaggtagtttttcagcccttgccatcttcccactctaatagaccccagtatctattattcccatctttatgttcgtgtatacccaatgcttagttctcacttataagtgagaacacagggtatttggttttctgttcctgtgttaattcacttaggataatggcctaccgctgcattcatgttgctgcaaagggcaggattttccatggtggtatatgtatcccattgtctttttccagtttgccattgatggcacctgggttgattgcatgtctttgctattgtgaataagtgctatgatgaacatatgagtgcatatgtctttttgtcagaattatttatttttctttgggtgaatacccagtaatgagattactgggttgagtggtagtttgaagttctttgagaaatctccaaactgctttttgcagtggctgatctaatttacatttccaccaacagcatataagcattcccttttctctgcagccttgccagcatctgttactttttgactttttgataatagccattctgactggcgtgagagggtatctcgtggttttgacttgcatttctctgatgattagtgatgtcgagcattttttcatatgtttcttggctgcttatatgttttcttgtgagaagtgtctgttcatgtcttttgcctaggaaaccctaaagactccgccataaggctcctaaaactgataaacaacttctgtaagtttcaggatacaaaatctgtgtacagaaatcagtagcattactaaaagccaataatgttcaagctgagagccaaaacaagcaggcaatcccatttacaatagccacacaccaaaaaaagtatgtaggaatacatttaaccaaggaggtgaaccatctccacaagaactacaaaacactgctgaaagaaatcatagctgacacaaacaaatggaaaaacattccatgctcatggattggaagaatgaatgtcattaaaatggccatactgccaatctacagattcagtgctattcctgtcaaactaccaatgtcatttttcacagaattagaggaatctattctaaaattcatatggctattcatttttttttcttttctttgagacggagtctagctctagctctgtcacccaggctgtagtgcaggggagccatctcggctcactgcaacctctgcctcccgggttcaagcaattctcctgcctcagcctcctgagtagctgggattacaggcgtctgccaccactcccagctaatttttgtatttttagtagagatggggtttcaccatgttagccaggatggtcttgatctcctgacctcctgacctcgtgatccgcctgcctcggtctcccaaggctattcatttttaaaagggaatactcaaaattagtcttccacagtgactcagtgactgctcatttcaaagcaaaaatcctttgaggtactttatgaataatatatatgttgcctaaattatataaagaattttagcagtgaaagttattaagatgatgattaaatatgaaaattggtatagtagctcttataaacttataatctgataacttaaaaatattgaaaaaggaaatgtttgcttaattcatagtgaacttcttttagaaagaaatgccattgtacttttattatcatagcaattttgatttgttttcaaaacatgatcccacattgtagtaaacctgtaagatattgacactgtactatatatatttattcgtaactataagattaccatatttatgtatattctgtattttttatttcacttttcaaaggcttgtctattgactattgaaaatacgtgttttcaatgagacaccatctcacaccagttagaatgacaatcattaaaaaggaaacgacagatgctggaggggatgtggagaaataggaaggcttttacactgttggtgtgtgtgtagatgagttcaaccrttgtggaagacagtgtggcaattcctcaaggatctagaaccagaaataccatttgacccagcaatgcccattactgggtgtatacccaaaggattataaatcattctactataaagacacatgcacacgtatgttgattgtagcactattcacaatagcaaagacttcgaaccaacccaaatgtccatcaatgatagactggataaagaaaatgtggcacatatacaccatagaatactctgcatccataaaaaaggataagttcatgtcctttgcagggacatggatgaagctggaaactatcattctcagcaaactaacacaggaacagaaaaccaaacaccacatgttcttactcaaaagtgggactcgaacagtgagaacacatggacacagggaggggaatatcacacaccgtggcttgtcgggggtggggagctaggagagggatagcattaggagaaatacctaatgtggataacgggttgatgggtgcagcagaccaccatgacacgtgtatacctgtgtaacaaacctgcacgttctacacatgtatcccagaacttaaagtataataaaatgaaaatatgtattttgtaagttgtgctgatagtaacttttttaaattgtatttctccatttaaatctgaaatggcaccatgtcttgatttcatgagtgatagaggaaagaagattacagtttagattgtgtgtatagtaaaataccattctactacatcattatttggctctctaaaagatgcctagagatgtttaacaatgggtaaaattatcttattttagttttttataagaatcaaagatggaacttttcagaaataaactctgattgtatgaggcatttttgactttccttatagtttttattttcaattataaaagcaaggcttgcaatttataaaatgttaaacaaaaagtatgtaatatgaaaacataagtctgccctcatccttgcatcgcttacagttgacactaacaattgagagtatattcctccagattttgttttgtttcatatatttaatawaagagacctgtatatcttcctcattatttttaagttccgtgaatatagctgtatcacaatttatgattatcttaatgatgaatgattcatttatgtctaattacatggaatatgtaatttcaaaaatatgctgtttgtataatggtttgtgataggtgatgctacttaacatcacttaatattttgatgcagagaaatatattcagatcttagagataatctgacagcattccaaaaatacctgattgagagtaacaaacaaatgatgcctttgaaagtctgggaactacaaggtatagtattttgagatactttaacacagcattttggtaactgatctgttttgtkaaataagcttttatatatcacatgatatagattattttatggacagtattaatgactagtgaataatataaattatgattttttgtggcaatacctrtttaacagatcatccctcaagcaagctatatttttatatttgcaagacttaaaattatatgaagtgaggttattcaatgttatttcaaaagtatatactgatttataggttagtctcaagtattaaatcacatttgtggagactataactgattaaaagtcctaactcctaggtaaggagaaaatgaaacttaatcttggttttcttctttttgaaatttagatcctgttaagactattgcatgtttcattgataaatgtttaatggaaacatcaaatggaggacatgcagttttacaaagttaggaacagcttctgtactgaaaacctacaagcagatattttgtgaacaaaatttgatttggtttgaacttttaagtmcttttcaatttataatttttcttctttatttgtaatgatttagtaggtcatggggacatgtcatctttctgcataatctaacttttgtcatcttttatcaacttttaaaaatataacagcttaataagctcttttgttaaataagcttttatatctcagatgatatagattattttatagacattagtgatgtaaataatgacattactataataatactattcatactaatacgttcacatactattcaatttgcccttttaaattctaccattcaatagtttttagcatatttttagaatgctgccactcttaacacagttgattttagaaaattctcatcatccccccaaaaaactaacaccctcattagcagtcactcctcatttcccaactccccagttgtaggcaaccaccaatctactttctgtttttaaaataacaactaaaaggatatttacaggccactctcactagtataacttacttataacatacaaataatattttatatttcatctggattatagtttacagagtcctttcatataaactatcttatttaagtgccagttaccacacagctaataagtgaagattttggtccaagtaaaattctttatactgtaccatatggtatctaggtaaactttatatacacttaacagaatattgaatgttacattttaaaattatagcagaatgtgcaagacacaatctattaagttttataacttctgctattctttacctacctaatacaaatgttgtatcaactaagccctgtatcattagaaaatcaatatatcaatagaaaaatcattcagcagaatgagattcaaggccattgttatgatagatttactgtaaagaatctacctctttgaactgmtagaatctattctccctggacccttctggtgtacagtttcctatttaatgtctcatctagacctcatgcttagacctccttttattataccacagcccttgtgactgttctttcacttgacatcatgataacactaaactgaggtagtagtttcaaattcattctcaataaggttactgagataatctttctaaaatgaaaatctgattttggccttgtgtcaaatcagccaggctttatcacttgtacatccctgatcaaatagtggccttacattagtccccacaggaaaatgttggcacacacaaactaaaaagtttaataaagggactttttacagagacaggcatgattgagggaaaccaacaaggaatggattattcgattccagtatttgcaactagatggaaacattttctacccctaatcttgagggagcaagaggagagagtggttaccaaaacctggagagtgtgtcgagagagctgcttgacacagcagtagtaccccgagggactgtcctctgtgtatcaaggaagggatctgggtagtaactattccactccttactcttttcttgcttactgatcccatattagttacttggattggctgaatctaactagaaatctgagggcaagggagcttattgatgcagttcagataggccagccttttgggggcccggagcaggaaagagtggatgcggggggcaaacaaagtatgcagtcctcttctctgagaaagttctgtttttccaaggtaaatacttctggagagacttcgaatgtaagaaggggttgataggactagctagccaagtcatttgcatcattaaggactgatttcatgcacatccattaaaagtattaagtttaaaccccttagcatggtttgtgaagctcttgtctaagttctaatagagcttatattcctaaatccataatttcagatagtctctttctagtatcttcaattatttttagatccttttttatgtctctattttagcactttttaaaaagtataattatgttttaagcctccttcaaaatgttctctaaggggcctttgcataatttagaaaagtataagtgatggggtgtttttgaaggcctttaagcaaagagtatgcatagtcagcttagttctagttgactccctaatgtctgtgtaagatgtatttcaatggactaaaagcaagaaatctaggtagacattactgaaatagtgatagaaggcatataaatatttagaaggtgaaaaggagtcaaagataattctaggatttctagcttgagcctgagtagagagaatatataaaacatgtaagcagactttggggctgaatatgggactcagaaataatgagactagtgttgaaaggttgatttaaagtcattgtaagatatccagatggttaggttcagtggtggggtgagtatcctgtccttaagctaaaggagaaacaatctgcctcactgttgaggtaggtaatgaaagaatttagttttaaatcttttctgactcttgacaaagtaataatactaagatgaattcttctgacatgtttgaaactaaccacagttagcaacacacatttttctttttataggattgtcatatcagataaaataatactaagtttaggattttatttcagcacaaaggtaaaacaatgttgaaagagaaattgaatgtttctatttactgagttaaacacagtggagctttcttagaggtcttttcagaattggctctttaaagctctttttactcctcttcattattcttttgactttttgtcatatgtttcatttaagtatagaaaaagctttgcgagagcatttcttttcatatatctctctcgaaattatactgtaatttgtgraaacaagaggtattaaatagtcattcataaaagtataaagcttatatttggaaataagtgataactttacatttaaaactttttaaaaatgcagatgtaacagtattaacatgtttgtatactaatacttggcaagaagaattgagtcaagtatttcaatttcatggaaatgtctataaaggtctaatattatgctagattccttaataatatttttccttccagatcttagttttcaagcagcttctcaaataatgtccgctccagtttatgatkccattaaattaatgaaagacatttcacagaacttccccataaaagccaggtatgttaaagtttataggtttcattgcagctataactctttctattaaatgagttttatgaaaatagctgatttcatttaacatgaaggtgtcaattagttctagtatatatagcttttgtgaaatcagggccttttcaatatatatatattttttgattagagcaaaatattggcttgtgcatacatgtgtgtatgcactgtaaggtagaactcttgttagaggcaaataggaaaaaaagtcctaaaaaattttctaaaatcatgcatagtaatctaaggaaaaacttgtttaagcaataaataatgaaggagtgttttttctttcccttatggaggatgataaaaagtattactctaagtaggaggtctatgcccaaagtactgccaaatcatattcttaccctttcagagtccaaatgattggtaatgtcttaattggatgaatattgtgtggagtacttttttgccaagaggatgtctcgttgaactgcttccatgaatactgatgttacattaaacatatattccatttcaataggaaatacatttgcatagcttaaagagaccggtgcatgcaatgcaagttaccacgtattatgagaatttgctatataacacaactttgatgcaattgtattctggttagggatgacagagtataaaattagcaacaagtaaaatatgagttagcttatactaaagagataaaatatgtgacaagtcgcagtgcatgggcaacaatggtgttttactgagaggaattggagagcagtctactagcttagcataccttcctaagcatagaatgattgctatgcctcttattgtcccaaacactattttgtacatttattcatcatacagattacagaatcttcaatatatgtattctttaattttgaaagtaaataaatagtacatggttggctacaagataccaaggattttttggtggtaccttgaaataaaggagtttgtttccttatttacagattaagaatgaatatattgatatgcctctttcagtcaactttaaatgtcaagaatttgagaagtcgtcatttatataataaaacatgaaatatatatgggtgtgtataaatgtcatatctgtttagccataatattttaattaatggccgttataaaaattattagatcaaatacaaataaagtaaaataactttagtcttgatcagacagttgattagctctattgatgctaagtcagtataactgttcagaggttctgatgcaaaactctgctgttaatctgtaattaagaaaaaattataaaatatgctaacattgcttaatggctaaattgtaggcttgagcatatctctaaaaccacttggtagacaatctgtaaatgtttgttgaaatgaaatatttgctaaataaatgaaaaatttgccttattaaatttttaattgtaatttctcacaatgctgccaaactttaggaaataatatatacttattgtgggctgtttcaaggtacacctttctacttgagttttccttaaagcagaactttgcattaacaatcttttaattttttaattctatttataaaatttgtaaaagctagtcatgtttaggaattatcaagttgaatacagtccataggaactgtattttgaacacttctgctgtctttaaattataagtgaattataaactcttcaagagtgaataggctgggtgcaatggctcgcacctataatttcagcactttgggaggtggcagtaggagggtcacttgaggccaggagttttagaccaacccgggcaacayaggaagactccatctctagaagaaaattgaaaaattagctggatgtggtggtgtgtacctgtagtcctatctaattgagaggctgaggcaggagaatcacttgagcccaggaacccgagactacagtgagttgtgatcatgccactgcagtcctgctgggtagaagagtgagactctgtctctaaaaaaatgtttttaataaacaaattgaaaaaattgaaagagtgagtgatgtaaagccatgatttcagttttttagaacatttctactctggtaggttcccaggttaactaaaaaattcttcatgtacgtatattcatgtacttatacattggtaatttcatacaaaatttctctattgggcaaaataacgcaaaacagctttttcaatgaagtgttttcaaaaaataagtcatagtaaatgatgacaatccatactgcatacagctagtacacatgaaattttgagaacctccattccacttgaaccaaatacttttgtcaaatgaaagctaaattaggccatatggaaatgtatacttttcagtcacaaaggatttggagtttttagcttcttatccaaagtattasattacattgggttatatagatsagttctaaacatttaaggaaggatcaattatattagtattcatttttccagatctctaaccagaattgctgtaaatcaacatatgagagaagaaataaaggaaaatcaaaaggtttgtttgaattccttttttaaaacatttacccaactaatatcactgtttctgactttggatcttcaatattcatacaaaaaaggaaatagtaatttgtgcttttttgattattaaaacagtctgggttcttctatttttatactgtggactatatgagcatttaatcagccaatcttttctgacataccttctacttatttcacagtatattccagaatttcttccgaggtagtatggttttcttcataggataaagaataaaggctgtgagttaattattctgtttcttgtaattagttttgcttaaaagcttgtgaagactgagtcagtgttagaccactggaacggtagaatcctatagcagatagaatacaatttatcagtggtttgataagattctgccaaatggtatcttaaattatccatagaccccaaataattctagttgtgttaatatttgtaaagtgcttacaccactgcctggctttattacataggaccggtttggctttaagtagtatcataccagactcacagggccctaaacactaggagttcatttttctcacttcttacctgtatttaaagccaaaagaggcagggtggatggtaccaaccacatttatcctcactaaagccttcttggaacattttagcagactggtttctatctcattggtgaggattttgccatgtggccaccttaggctgcgygggaagctagaaaagctagtgtttacttttctaataacgaagcaaaggagaagtggcctgggtatggtgctaacttagccagccagcagtgcccatcatactgagacagagtgagctgtcaacaaatgtcagctgttttgatgacaactacaatgatggtaatgaagaaaaagatgcatagttcattggagaacaggtgttaggaaccacaacacatcattcctacctgggacattctttgcctcattgaccaccttacaaattcctgtgtatccttcaaaacggatttgtggtattggtccattctatgatgttcctaattgttcttaccattcttcatgcagaatggattgttttcttatgacacacaaaggagtgggtttgggagtggaggcttaatacgcaaaagaaagagaaaggagaacagctctctctctcttatgagagagaggggcacctgaatgggaattcgggctgcctacagagtgcactggattttacaaataggcttgaggaggcggtgtctgatttacatagggcccacaaattggttggagcaggtatgatgttttacataatgcatggggaaggctgaccactccaccctattatgcatatgggctttccacttggctgctgccatgttatctgcttcttactgtacatgtggactggaaagaagggaagatggagctgccgttttgaacatgcctggtcccaggtaacctgttcctactggcacaatgccagcatttacctatgcaagcttctagcttgcttgcctgtgtctgcagctcgattttacaggctgttctttgttagaaaataaaatgatttgggggcggcttttcattaaaaggaaaaccttaccgaggactcactatctgcctaaataatttcttcctaactgctatatcagaaccatgctggcaacctgagtatgccagcttactcagggccactatggccatcaccttatctacctgtcagccatttggaattggcagtgaaagagttttgaaatgagctttgactgcagagcaagaaatcttgaatttagtaaactaaataatcatgacactgcagatagtcttcttgatcacctactacttccagagaacactgaaaagagaaagacaaggatgataatgtctttcatgtaactaatctaggctaaatgggtatttggactagcagtccatgttacccactagctcatgagatgtgggagaagtaattaaagaaactgaagttccaaccttggggaagagggtggttgtgatgagaaggtaagaaaatcttggactattcattgcaattgcattgcacacggattggacacgagaaagccctggaaatgtgtttctgttacagcatctcatccatacaaaccgaaaagtacatttcctgcaaaacatgtaaacaaaatgttcaccgaaaaaagaagtaataatggtctttttttcttcttcttctcatgctgcagtttatttacaccaggtcaattgctctggtgtaaattacactttttaaggatttacttaagaaatttgaaggattttcctctgggtctgggactaaactaaaacaaaagtgtcttaagcataatttttctcacttgggggtactgcagagctcctggctttacttaaggagataaagaggatatgaccttcgagtagaggagataagaaacatttagtttaaaataaatacataaataaaagaaacatcctgcccacaaatataaaaggaaacaggaagaatctttgagatggagtcttgctctgtcacccaggctggagtgcagtggcatgatcttggctcactgcagcctctgcctcccgggttccagcaattctcctgcctcagcctccttgggtagctgggattacaggtacacgccaccacacccggctaatttttgtatttttagtagagacagggtttcgccatgttggccaggctggtcacgaactcctgacctcaggtaatctgccccgccttggcctcccaagaatcttgattccaaagcgacatccagctctgaagagcacacactgtggatgctgggctgctccatcttcccactagagggcgcaaaggctttagttaaaaaccaagccaaacccaaaccatctactttgatcagttgtttgttttaatttcagtaggttttttgggaacagatggtgtttagttacatcaataagttatttagtggtgatttctgagattttggtgcacccatcacctgaacagtgtacctggtacccaatgtgtagtctttgatctcttgccaccccccgccctttcccccgagtccccaaagtccaatgtatcattcttatgtctttgcatcctcaaagcttagctcccacatatgagtgagaacatatgatgtttggttttccattcctgagttacttcagttagaatgatagtcttcgattccatccaggttgcacaaatgccatttcattcctttttatggctgagtagtattccgtggtatgtatagggtatttgggctgattccatatttttgcaattgcatattgttctgctataaacatgcatatgcaagtatctttttcatataatgacttcccccccacccctctgggcagttacctagtagtgggattgctagatcaaatggtagatctgcttttacgaatctccacattgttttccatagtgattgtactagtttacattcccaccaacattgtaaaagtgttcccttttcaccacatccgtgccaacatctgttactttttggttttttaaattatacccattcttgtaggagtgaggtggtattgcattgtggttttgatttgcatttctctgatacttagtgatgttgagcatttttccatatgcttgttgcccacttgtatatcttcttttgagaattgtctaattcatgttcttagcccactttttgatgggatttttttttcttgctgatttgagttctgtgtagattctggatattagtcctttttcggatgtgtagattgtgaagattttctcccactctgggctgtctgctaactctgctgtcctttttaatttaaggtctttaaatayataataacaatctttccttactcataataagaagaatacagatcagaattaaactgagaaagaaagatttcaaaaagttggcagggcattctgtaagcaagtctgtatttttttttttttttttttttttttgcgtaagagaccaggggaaatgagaatatatatttacctattctagtttttgcatgaagaaatactagaggatggagaagaaactttgggagaaaattttgcctataagagccagggatgaaacgggtgaagggtgccaggattggcataattcttctagtgtagctttttatatagtttttgacttgggactcaagcaaagattattcaraaactatgactatgctcaagttgtataactgaatttgagtttggttttatttaggagacaactgctttaactccaaagtacagcaaatttcctttggaagttcataattgttgttaatttgctgtgagtggccagaatctgcttttggtgattttaaattgtcaacccaacatacgtctttgttgtttattgcaagaattgttatagtccatgacattttttatttgcttcaaaataaaatgaggatatgatcaggtggtcaggtaactttttatgattcagcagagtggaacaaataatttcaattacataattgcttaatgaaccaaatgcagatacttgaattaactaaaatgcagatattcaaataaaggattgcaccttacccaaataaaagttgatgttgcttctaattatttctaactactttgtgtgagaattatacagagttctggagacattacctatattagaacatcatctctcaaaactacatctgtaaatcatactttttaagtcttatcttgtcttattccttattctgaaaatgammacatttctattaagatttatatctgatttgacttcaaattttaatcgtaaagaatgaaactagacccccatctctcaccatatacgaaaatcaaatcaataggggttaaagacttaaatgtgagacctgaaactgtgaaactgctagaagaaaacattggggaaatgctttaggacattggtctatgcaaagatttcttgagtaagaactgaaaagcacaggcaaccaaagcaatttggacaaatgggatcatatcaagataaaaatgttctgtacagagaaggaagcagtcaacaaagtgaagagaaaatctacagaatgggacagagtattttcagattattcaacagtcaagggattgataaccagaatatataaggagctcaaacaacagcaaaacaatgaataatctaattttaaaataggcaaaaaatttgaataggcatttctcaaaagaaggcatacagatggccaacagtgatgctcaccatcactaatcgtcagggaaatgcaaatcaaaaccacaatgagatagtgtctcacgtgttaaaatgacttttttcttttttgtaagtttgctctttttttaattttaattttactttaagttctgggatacatatgcagaacatgcgggtttgttacgtaggtacacttgtgccatggtggtttgctgcccctatcaacccatyatctaggttttgagccctgcatacttwaggtatttgtcctaatgctctctctccccttgccccctaccccctggcaggccacatgtgtccatgtgttctcattgttcatctcccacttatgagtgagaacatgcagtgtttcactttctgttcctatgttagtttgctgagaatgatggcttctagcttcatccatgtccctgcaaaggacatgaactcattcttttctatgactgcatagtattccatggtgtacatgtgccacattttctttatccagtctatcattgatgagcatttgggttggttccaagtctttgctgttgtaaataatgctgcaataaacatacgtgtgcatttgtctttatggtagaatgatttataatcctttgggtatatacccactaatgggactgctgggtcaaatggtatttctggttctagattcttgaggaatcgacactgtcttctacaatggtttaactaatttaaattcccatcaatagtgtaaaagcattcctgtttctccacatcctctccagcatctgttgtttcctgactttttaatgatcaccattctaactggcatgagatggtatctcattgtggttttgatttgcatttctctagtgataatgaactttttttcttatgtttgttggctgcatagatgtcctcttttgagaagtgtctgttcatatccttcgcccactttctgatggagttgtttgttttttcttgtaaatttgtttaagttccttgtagattctggatattagacctttgtcagatgggtagattgcaaagactttctcccattctgtaggttgcctgttcactctgatgatagtttcttttgctgtgcagaagctctgtagtttgattagatcccattagtcaattttggcttttgttggaattgctttttggtattttagtcatgaagtctttgcccatgcctgtgtcctgaatgatattgcctargttttcttctaggatttttatggttttaggttttacatgtaagtctttaatctatcttgagttagtttttgtataaggtgtaaggaaggggtccagtttctgttttctgcatatggctagccagttttcctagcaccatttattaaatagggaatcctttcctcattgcttgtttttgtcaggtttgtcgaagatcagatggttgtagatgtgtggtgttgtttctgagacctctgttttcttcctttgatctatgtatctgttttggtaccagtaccatgcggttttagttactgtagccttgtagtatagtttgaagtcagcgtgatgcctccagctatgttgtttttgctttggattgtcttggctatacgggctcttttctggttccatatgaaatttaaagtagttttttctaattctgtgaagaaagttgatggtagcttgatgggaatagcattgaatccataaattactttggacagtatggaaaatggcttttttctaaaacaaaaaaaataacagattctgggaaggatacagagaaaggggaacccttgtgcactgttggtgggaatgtacattagtaaagccacaatggaaaacagtagtatagaggttcacaaaaaaaatgaaaaatagaattaccatatgatccaggaatcccactgctggatatatacccaaaagtaaggaaattagtatatcaaagagatatctgcactgccatgtttattaaaacactattcacaatagctaaaatatggattcaagctaggtgtccattaatggatgggtggataaaggaaatttggtacatagacacaatggaatattatttagtcataaaaaagaaatcctgtcatctttagcaacaatagaggacattatgttaagtgaaataagccatacacagaaagacatactacaagttattactcatatgtgagagctaaaaacactgatctcatggaggtagagagtagaacgatggttattggaggctggggaaaatgaggaggggttggttaatgggtgcaaaaatacagtcaggaataagatctattcattagcataatagggtgattatgcttaacattaatttattgtatactttaactggaagagtggatttggaatgtcccctacattaagaaatggtaaatatttgagatgatggatatcccaattaccctgctttgatcattacacattatatgcttctatcaaaatatcacaagatctccataaatgtgtacaactattatgtacccgtgaaaattaaaaataaaatttttaagaaaaatttaaatttcagagtgtgtatcatttcaccttaggaacacccaaacatgtttataaaccattttaacattgtaaatctcaaccagtcttctgagatccaatcaattggaatttctttagcttcaggtaatagctcagctccattggttattaaagagacatattagaataaatgggttccctcttctttaaggaaaaatgagcttatatttcttcattaggatttgcatttatttctgctcaagcctaagagggctgctagtttmattgcactttaaatacaaaaatctaagttttttggactataaatatagtatgaaatccagctccaaacccatatgaaaataagctagaggccatgaattcatttgggagacttactcttcctccaccaagaaccaaggtgaggtagacaaatttctatgctgttactgcagagcattttgttttctaattcaccttttcaccataagtgtagcactttatgtgtgcataaggatatctggatgtgggtcctggatttaaatttcttgttcttctgagattggcccttaaaaacccaaatcctaggtcatctaggaagctctaaatttcctccaggcaaggtctttagtgtttatttacatctctatattcatattcctacttcctctctgtccttaggtgaatactttcttcaactcagagccgcatttaggggacatttttcatatttatttttttgagacagagtatcgctctatcatccaggatggagtgcagtggtgcgatctcagctcactgcaacctccacctcctgggatgaagcgattctcttgcctcagcctcccgagtactgggactacaggcatgcaccaccacacccagctaatttttctatttttgatagaaacagggtttcaccatgttggacaggctggtctcatactcctgacctcaagtgatccaccagcctcagcctcccaaagtgctgggataacaggtgtgagccaccgcacccagtctcattattaatatttaaatctagcattttgatacttttagtaagaaaatgtttggatctttggttcatcatgttgctagaaattgaattcttactcctcatttaagaaaggccaccttaaattacatactcaaatatacactagtttttcaggacttaaggstaactctctggggcagaggaaagagaagaatttgtaattacttatctctgataggcaaacctcttctctctgacagtgtttgagcaagcagacttgctgagttcagtctgttacctgttttctgagcattattgttcaaggccctgggcctgacataaacagtcttgagggatttagcaatttaatatggatctgcatgcttggtgtactttgtacttacaattgagctccactaaaacgaatgtatgaggtgctggagaaagcttcaatcagggtgtgtgaagtttcgatgccagattgggggaaaacagcaggaaatataaattcactaggcatctgtagattttgaagttggaatatggatttcttaattaactttgataggcacatctaaagtagctaaagacaaataaaaattttacctctgaaccttttcatatcagggtttaatcttttgccagtattctgtataaaacaagtagaaatactttaagttcttctccctcctctgtgtgtagctcatctgttgagtgataatcgtacagaaaaattcaccattgtcaagctttctctgaatctcttcaagttagttgcttcctctgcctttacagagtagttcacacaagtccctattatgtgacttatcatatgatgttgaaatacactggttgtttttcctcctaaatatatttgcctaccctgataataacagctttcatttgtgagcactttataggtgacaagacatagatgtatattacatttaaactatagcaaacatgtgagatagatataattattcccattttatagatgaggaaactgaggattatgaaagtgatttgaacttgcccaaatcttaacagctaataagtagaaagatcaggattaaaccaagcatgatcttcacactgtgatcttgacaaccgtactggatacttacactgtgatcttgactactttgctttagtgacaagaacatccccctttttacttttgttaactgttctagcgcctggagatgtttctagaacatagcaggcactcaggaaatgtttactgaatgaaagacagtgaaaaatcaaatatagctttaatggaaacttttatgaatttagagtgagctccaaatatttacacataaatcaaagttttacttttggcatatcattgcctcaagaaataggaatgtgccaactagcaaattgtatatgtacacatacacacactatatgaaatgtagataagtaattattgtaacattagaactgtaatatcatgtattgtaaaatcagaatattcaggtattgaattttatctctaatctatcttaagattccccccatcactgagatcagggctgggcaaactgctacctttaggccaaatatggtctgccacctatttttataaataaaagcttaatttttatttttatttattatttattattttatttatttttttgagatggagtttcgttcttgttgcccaggctggagtgcaatggtgcaatcttggctcactgcaacctccgcctcctggattcaagtgattctcctgcctcagcctcccaagtagctgggattacgggcatgtgccaccacgcccagctaattttttgtgtttagtagagatggggtttcaccatgttggtcagggtggtcttgaactcctgacctcaggtgatccacccacctcggcctcccaaagttctggcattacaggcgtaagccgccacgcctggcctaaaagcttaatttttacaataaacattgcaatgtccatttgtttacatagtatctaaagatacaaaggcagagatcaataattgcaacagagactgtatggcctgccaaacctaaaatatttactctctgactctttatagaaataatatggtgacccctaatataggtcactattgttctatcactggttaactattgctttgctctacttcaaggatcttcaagttagatttaaaattcagccaggcgatgctcgtctatttataaatggccttcgtgttgatatggatgtttatgacgctttyaggtaagtattaaattattgctgtaaatgaactatggtttatataaaaataaacattgtcttgaatttagtgtaagtcaaaatatgaagatcactttaaagataaatacatgtttttgattgtacaaaacagctttcttctaccaaaatgggcaagcccaaagtgtcttagaatatcagaactgggagaaacagtcaagatatttgtttggatgagggttagacctataattactttgttattctaaactgtctyttattgaagagtagattgatgatttgcagagaagttatttggaactggactgaacaaccagataccagataaggactgaagtcaacatggggtatttccccagaagacagaaattgacaagaggaatttaaaatgcttgtatttgaatgctggatgctatctggtttcttgtcaaaaaaaaaaaaaaaattcttcaaaatttttttgctcagaattttgaacaggacagaattaggaagtccttgctttatcaatggtcactcacccaaaattacagttgtgggccaaacagaagagttacttttatagagaaacataaaactacattaaaattaatatttgaaacattagatgaacttaggatacatgatactttaattcagatgttcagttttaattcaattgaatatacttttgttgaagtgaaattatttgaattgtttatttaaattcttaccagtttggaaatacgttggaaaatatattggaaagactgagaagtagttttactgaacattttttacagttttatctcaaatggggcttttctctttagttacttgaattcttggacctagtattgtaaaaataataagatagatacatataatacacatagaaagagtagagaagtttgtaaatgctagcctgtaaatttcaggggaacaaaaattatatatgtgcccagcagcagtgaaaacaggtttaaaggaagtagtgaaatggtatgtagattttagaaagttttctaaggtagtgtatgaggaaatttttatggcaggaatattttcacgtataatttaggaaggctgtaggttattaaaaaaataaaaccccccagctcctacacctggtcattagtgatttgcaggatgtgtgctacattgttattcctcattgatttgatcactgcttagtgctaccatgattctcttaaaagaggaagagacaaaatgtgagaatatttgtgtcttcagaggatgtggaataaaattaatgcaaagaggaagatgaatggaagaaaataaggaaatggaagtaaaatgtcatattacagagacattatatatagagaggttttatgcagccaatactttggaatcgtccatgtggggaaagaacaggagtaaaggatttattttgtgctcccttcctatctcctttcagtcattgcattactgggttgtggagaaccaataacatgccccatacatggcccagcccttcttgctctgatcctgagagtagcgggaggagccagagcctccatgggttaggattagatcagcattggttctataaaggcctacatctcacccccagggagactgagacagtaagaacatgtgactttgactggggagaaaggcaagtaggactgatgaagtccataagcagggtcttatatatctacattaaaacattctgttctagcccattaaagagtcccttttatatttttgcctctgaatagtcgcctcagccacagacttgatgaagagtagtttaaacatttagattccccaatttgttgtcaatggggttattgttgatgttgttgtttacagtaatactttctattatgtttaagaactttcaaattatatgtaataaaaaatttaaatttgtattcaaacacacgtgaacttcatgatttaatggagcttcctctgtattagaattttatactttatgtcttgttcgatcttacattatttttgtagtaggtttgtcaaaagagtgacctaatattttttttctcatttttggctttctcagggctgatcatatcctcactactttgataaagaatacaatagtctttgttgttttatcttttatataataataagtttttactaccactaaaattatgtaagtttactctggataactaattagaactrtttgccttatttcttaatgagtttaatatatttttcctgctattaatgaagataccaaaaaatctcatttctaatgctttaagactatcaaactttaaaacatttgtttttaatttggaaaatcaaaataaaactgttttttctttgaatatatagtattttggatatgctgaaattagaaggaaaaatgatgaatggccttcgcaatcttgggatcaatggggaagatatgagcaaatttttaaaattaaattcacacatttgggaatatacttatgtattagatattcgacattcttctataatggtaagtgcttatgctattccttgttctaaaacctgtagtatacttaaggcttaacataaaatgaagtatcggcaggcctgatgataaatgtcagcattttggaacagttctcagtgaaaagagaaagtcaaactatagacccatctcctctcccacttgcagcttccttctccttcttcatagtctctgttttgtcacaagaatacctactcaatctcattcagtgtcttttccaccttcagagataacaacagaataaccacatgaacaataacaacaagacaccaaatacatggttaaaatctgaggtgtatataaaagtgctaccttaacatgatgaaagtcctgccgaaacaatttgcagcggcctccaaaggttctggtgtgtgtattacagcccaagtgatttttgtgaaaaacatttgatcatatcaccctttcttgcttaagcagagaagtggtcttcagtatggcctatgaggctgcagatggctgctgtcacctttcatttcttagactgtgaaacgttcttttcactactatcctttgtctcatgcttagaaagcactttttttttctctatccagttaactcctattcctttttcaaagttaggttgaaatagccctttctgagagaaactttccttaacaatccagatggttttttaaatctacatgttgtgttaagagaatccccagagaccaacctctaatccagtgatttgctagaaggacttgcaagacccagaagttgttatattcatggttatggcttagtagagcaaaatgatgtgaaaaaatcagcaggggtgaagtccagagtaaaccaggtataagcttccaagagttccctcctagtggagttgtgtgcttaatgtgatatatgacaatgtgggcaaagtgcttcctaccagggaagctcacttacttgagcctgagttcaagattgtgagagacgatccatcatgtagacatacagtggctctctgtacctgccatcagtggctgaatctccggactgaggaaaagcagatgtttattataactcagattgtataaactctttagacaaactgctggaactgctgcagcatggctcaggktcctaactgtgcaaaacactcttttatcaatcagaacattccaagagcttaattatcaggacccagtcaagagacagtcatgtaaacagacccttcttgggaatatccaaggtgtgagcaacccaagcctcttgagttaaccctttcatacacacacacgtatatgtgtataatgtgattcttcatacatgtatacatgtatgggtatagcacatgtattaggccatgcttaccttgctataaagaaatacctgagactgggtaattcataaaaaaaagaagtttacttgacttacagttctgcagggtttataggaagcatggtgccaacatctgtttggcttctgggagctttaattcgcagcagagggcagagagggagcaggtatctcatatggcaagaacaggagtgagagagagtgttggagggtaggtgccatacatttaagcagcytggtcttgctagaagtcacatcacaaagacaacaccaagacatgagggatctgcccccatgacccaacacgtcctatcaggccctacctccggcattggggattacaattcagcgtaagatttgggtggggacaagtatccaaattatatcagcacatatacatacattatatgtcagaactattaatccattcgtatacttagcacagttatagttttacatttatcctgtgatgcttttatatctgttttttattaggctatatataaagttcttgaaggtagaaattttttcattttttctcttaccattatgtccctggttttagtggtactcaataaatataaatattccctaaatgaataagtaactwtttatctgaaaacaacaaaaaacatcatttttaatgatgaaactctggaagcattacaattacaacatgatcaatataattatccttaagatttaatattattataaaaggagtaactgttagaaatgaggaaataaaagtgttgtgtgacaagattgtataactgaaactcctcaaagaaagctataataaaaggctttaataaaatgggtttgaagtgacatgataaagatcaaaagcttttctttcaagatctatttggaagataatgatttatttacaataacataaaaatgtaaataccctaataataaccactatgaaataatatctcaatacctattgataaaaactagaatttaactgaggacgtgtaaatcagcatatccttttaaaaagttatgcctggccaggcacagtgtctcatgcctgtaatcccagcagtttgggaggccaaggtgggcggatcatgaggtcaggagattgagaccatcctggccagcatggtgaaaccccgtctctactamatgtacaaaaattagctgggtgtggtggcacgtgtctgtagtcccagctacttgggaggctgaggcaggaaaatcgcttgaacctgagaggtggaggttgcagtgagccaggatcgccctactgcactccagcctgggcgatagagcgagactccatctcaaaaaaaaaaaaaacaaaaaagttgggggtgcgcgtgggggctgggcgtggtggctcacgcctgtaatcccagcactttgaggagcacgtggtgggcaaatcacaaggtcaggagatcaagaccatcctggccaaaatggtgaaaccctgtctctactaaaaatacaaaaattagctgggtgtggtggtacgtgcctgtagtcccagctacttgggaggctgaggcaggagaatacgttggaccttggaggcagaggttgcagtaagctgaaatggtgccactgcactcaagcctggcaacagagcaagactccatctcaaaaaaaaaaaaaaaggttatgcctgtggtgcccttataacgatacatagtttgtctagtaatttctctcctggaaactatcataaaaaaacagtgggaaatggaaaaaaagctttgtggccaaagatatgattatcactacatattttgaaaacaaagtagaaactagttatctaacagagaagcgttataaattttacattcacacaatcgagtattattgacatgaaaattatgtttataaatatgacttaagataatgattctgttaagtaaaaaatatagaattatgtcatgtaaaaatatgggcagaagatcagaaggaaatatatcaaaatttaaggcattaatgggtgatgtggtttaatgggtagttttaatttttttcatcatgttcttctgtgaattccaaacttttaaccatgggtatgtattatttacatgatcataagaaaatagttttttggttttttaaattgatacacaayattttacatatttatgagattcatgtgatattttcttatgtatgtaaggtgtgtaatgatgaaatcagtgtatttggggtatccgtcactagcagtatttatcatttctatgtgttgggaacattttaagtctttttttctagctactttgaattatgtaatatattgctgctaactatagtcaccctactttgctattgaatagtagaatttataccttctatctaactgtatagataactgtttgtacctattgactaacctctcttcatcaacccctcccaccagcatgcccttcccagcctctggtatctatcattctactctaactccatgaggtcaatatttttatttcccacttacgagtgagaacacaggatattggtctttctgtatctggcttatttcacttaacacagtgacctccagtttcctccatgttgctgcaaatgacatttcattcttttctgtggccaaataatactccattgtgaatatataccacatattctttatccattcatctgttgatagacacttaacgttgattatatatgtttgctatcgtgaatagtgctataataaacaggcaagtgcaggtatctctttgagatgttggtttcttttcctttcaaaaaatacctcataatgggattgctggattggatggtagttcagtttttagatttttgaggaatctccatagtgttttccattgtggttatactagtttacattcccagcaactatctataagagttccttttttccacatcctcaccaacacctgctattcttttatctttttaatgatagccattctaactggggtaaaatgatattccgtgtcacttttatttacatttatctaataattagtratgttgaacattatatacttgtttgccatctgtataatttctttatttttttcattattattatacttttaagttttagggtacatgtgcacaatgtgcaggttagttacatatgtatacatgtgccatgctggtgtgctgcacccattaactcgtcatttagcattaggtatatcacctaatgctattcctcccccctccccccaccccacaacagaccccagagtgtgatgttccccttcctgtgtccatgtgttctcattgttcaattcccacctatgagtgagaacatggcggtgtttggttttttgtccttgtgatagtttactgagaatgatgatttccartttcatccatgtccctacaaaggacatgaactcatcattttttaaggctgcatagtattccatggtgtatatgtgccacattttcttaatccagtctatcattgttggacatttgggttggttccaagtctttgctattgtgaatagtgccgcaataaacatacatgtgcatgtgtctttatrgcagcatgatttatagtcctttgggtatatacccagtaatgggatggctgggtcaaatggtatttctagttctagatccctgaggaatcgtcacactgacttccacaatggttgaactagtttacagtcccaccaacagtgtaaaagtgttcctatttctccacatcctctccagcacctgttgtttcctgactttttaatgatcgccattctaactggtgtgagatggtatctcattgtggttttgatttgcatttctctgatggccagtgatggtgagcattttttcatgtgttttttggctgcataaatgtcttcttttgagaagcatctgttcatgtccttcacccactttttgatggggtcgtttttttcttgtaaatttgtttgagttcattgtagattctggatattagccctttgtcagatgggtaggttgcgaaaattttctcccattttgtaggttgcctgttcacactgatggtagtttcttttgctgtgcagaagctctttagtttaattagatcccatttgtcaattttggcttttgttgccattgcttttggtgttttagacatgaagtccttgcccatgcctatgtcctgaatggtttcttatgagaaattcagatattttgctcttttaaaaataagattgtttattttattgttgagttgttcaacttccttgtatattcttaatattagcccctgtagcaatagtttgcaaatattttctcccatcgaacaggcttgctcttcactctgttgattttttttcctttgctgtgcagaaggtttttcccatttgtctatttttacttctgttgtctgtgtttttgaggtcttagccataaaatctttacctattagaccaatgtccaaaagtgtttgccttatgttttcttctagtagttttatactttggggtatgtttaagtctttaatccatcttgagttgatttctgtacatggtaagtgatggtggtctagcttcattattctgcatatcgatatcagattttcccagaaccatgtattcaagagggtgtcctttcccaaatgtatgttcttggcacctttatcaaaaatcaattggctataaatacatgaatttatttctggattctctgttctcttccattggtctgtgtgtctgtctttatatcaataccatgctgttttggttactgtaactatattttcaaatcaggtggtgtgatgcatccagttttggctttggatattcaggttcttgtttggttccatacgaattttaggattttttttctatctctgaaaaatgatgatatcttaatagagattgcattgaatctatagattgctttgggcagtatcatcattttaatatttatctgaaccatgagcatgggatgtttttccatttatttctgtctttttcaattttttcttgtacagatcttttacctccttggttaaattaattcctaagtattttttgcagctactgtaaatgggattacccttttgatttcttttttggctatttcattatttgtgtatagaaacactactgatttttgtgtgctgattttatatcctgcaactttattgaatttatcagttctaagaattttctggtggagtccttggtttttctagatatacaatcatgttgtgtgcaaagagggacagtttaacttcctcttttccaatttggatgcatttgtttttcttgcctgattgctctggttaggacttccagtaccacattgaataggagtggtgaaagtgggcatccttgtcttgttgcagttcttagaactcagcttttccacagtgcgtatgatgttagctgtgtgtttgtcatttctggcctttatattatgctaaggtatattcctttggtgtctagtttgtttagagtttttaatcatgaatgaatgttgaatttaatcagattctttttctgcatctattaagaggatatggtttttttttcttctattgatgtgatgtatcacatttattgatttgtgtatgttgaactatccttgcatctctggggtaaatcccacttgatcatggtgtattatatttttgatatgcttttggatttggcttactagtattttgttgagaatttgtgcatctgtgttcatcagtgatatggtttggctgtgtccccacccaaatttcatcttgaattcccacgtgttgtgggagggacccagtgggaggtaattgaatcatgggggcagrtctttccatgctgttctcatgatagtgaataagtcttatgagatctgatggctctataagggagagtttccctgagcaagctctctttttgcttgctgccatccatataagatgtgacttgttcytccatgcctcccaccgtgattgtgaggcctccccagtcatatggaactgtaagtcctttgaaccctttttcctgtttaaattacccggtctcgggtatgcctttatcagcagcatgaaaacagactaatacaatcaggaatattggcctgtggttttcctttattgttgtgtcctcgtctggttttggtatccgggtaatgctggtttcatagaatgtgagttaggaagaattctctcctcttcatttttttgggaataatttgaggagaatttgtgttcttttttgaaagtttggtagaattaggtagtaaagccatctagtcctggactcttctttgttgggagactttttattactgattgaatcttattactcattattggtttgttcaggttttctgtttcttcctaattcagtcttggtgtgttgtatatgtccaggaatttatccatttcctccaaggtttccagtttgttagtgtatagttttctataatagtctctgatgatcttttttgtttatatgatatcagtgtgcttcttcatttctgacttttttggaggtcttctctgtcatggttagtctatcaagtggtttatcttttcaaaaaacaaacttttcattttgttgatcctttgtattttttctttagtatcaatttcatttagttctgctctgatcttatttatttttttctgctaattttgggtttgttcttgcttttctatttccttgagatgcatcattaaattgtttatttgaatctttctcctttttgatataagagcttactgctacacacttctttattggcactgcttttgctatatcccacaggttttagtatgttgtgtttacatgttcatttgtttcaagacattttttatttcctccttcatttcttccttgacccagtaattcaggagcatgttgtttaatttccatgtgtttgtattgcttccaaagtttctcttgttattgatttgtagttttattccattgtggtgtgagaaaatacttgatatgatttcaatttctaaaaatttattgagacttgtttttgtgtcccaacatatggtgtatcctggagaatattccatctgctggtaagaagaatgtgtattttgtagctattggatgaaatattgggtaaatttctaaagtctatttcatcaaatgtacattttaaatccagtgttcttttcaattttccatctaggtattgctgagagtagggtgttgaaggttccagctattattgttttggagtctctctctctctttagctgtaataatgtttgctttatatgtgtaggtactccagtgtttgggtgcatatatgtttaggagtgttttaacttcttgaagaatttatccctttattattatataatgactatctttgtccttttaactgtttttgacctaaagttttatctgataaaagtatagctattcctgcttgcttttggtttccatttgcatggattatctttttccattcctttacttccagtttatatatctctttacaagtgagatgagtttctttaaggcagtgtatggatgggtcttgttttttaatccattcagccagtctgtatcttctaagtgtaaagtttaattcatttacattcaaggttattattgatatgtgaggacttatttctgtcattttattagttgatttctgtttattttgtgtgttctctgtttctctctctctctctttaacaattgtgtcttgttggttttctgtattggtaacatttgaatcttttctctgacttcagtggtttgttctaccagtggtatttatgtttcaggatggtagataccattctttcacttctgggtataggactcccttaagcatttcttgcagggctggtctagtggtgaagaattccctcagcttttgcttgtctgggaaagactttatttttccttcatttatgaaggataactttgctgggtatagtatcctcaactggcaggcattttcttacaggactttaaatatatcatgccattttctcctggcctgtaaagtttctgtggagaaatctgctgttaatctgatgggtgttcccactagatgcttttcacttgctgtttatagaaatctctctttctctttaaattttgacagtttgactataatttgccatgggcaaaaccttttggaattgtatctatttgggaatctctgtgcctcctgtatttggatatctaaatctcattagacttgggaagtctttwtctgttatttcattaaataggttttctaatactttttttttaatcttctgggacagcaaaattcaaatatttggtcactttatggtgtctcatatgtcacataggctttgcttattcttttttgtatgtatttttatttgactgggatatttcaaaagtcttgtcttaaaattctgagattcttgattctacttgatttagtccactgctgaagcttttcaatacattttacatgtcattcaatgaattttctatttggttctggtaaatttctcacttatttcctgaattgtttttctgatatttttggattgttttaaagtattctcttatagctcactgagcttaatttcaatattttgaattgtttttctgggatttcataaatgtcttttagattgggatctgttgctggagaattattgtgttcctttggagattgcttatgttcctgtgtccttacgttgacatctgtgcatctggtgtaacagttacttattccattttttaaaaatttccattgttaggggaagactttttcctgaccatttatggtgttagttgcatagtacactttttggcattgattctcaatgtgtgcagtagggtaatctctgtatgatttcttcatctgtaaacagcatcagtggtgtctctgtttgctaggtggcttgtagcacagttgctagtggaggctgtgatgaagttttgctgaaatgtgggacaccagttgggccagacttagggccctatgggtggcgatggtgggttgagccttggcccccagggtggtgtacactagcaccagtgttagcaggtgcagggaggttgattcttgggcctctagatgacttgcttgggtgctgggaatgacagtggtaggtaggttcttgagcacctgagcagtggttgtggcacgggcaatggcagtaagtggcgggacaattctctaggacctaagggtccatgccagtgttggcagtagctgtgatgggctgggtcagccattgcccaggccctgaggtgatggtagtggcaggttgggtgggcatgacactgggaggtgtgctcagatgccaatggtaatggattgtgctgggtgatccccacgtccctggacagcatgcttaggtactgggggtgatagaaccaggcaagatggttcttaggccccatgttggtacattcaggctctggctatggttggtgggcagcaggggagcgggatgatccaccggccataggtggatgctcaggtagaggcagcagcagcagctgtgctgctgttctgctactggagagggtgaagtcactttcaacaggagcaattggaggcaggtggctggggcatgctttgctcatcctatgtccccccaccccaaaacacacacacacagtttgcagcaaatggaatttgtcctcaggtgcatggaaatgtgtgattgtccctctgctggggaggcagtgtgactgccagtggttctgccttggccctagcagggaatgtcagtgggaccccagagatatggagatgcgggggctgttaggccccagggcaggacacagtctgtgggagctgggctctcaaaatgatgccatactgcagtggcttaggactcaggggtttgtgggactgggcatgagctccctctctggatcagtggcattgtgcaatctccaggtagctccctctgttagtctcagaagcccataagggtgaaggggcttttccatggttaggttggtaggagtccgtagtggaaacgtggactgctgagggtctctcacttacactttccttgcattagggaacctctctaggcttccagccaatcccagcctagcagtctgccttatttccctctcctttcttgctttcgggtactcctgtcacttctctggtgaattccagtgtgctcccttagacgacctattcgaagtgtgattatctgcttactatattggttcctttccatggaagaggcaagtagcagatacatctattcagccatcttgaagccccttcttaaaaaaaaaaaaaaaaaagatcttaaggggaaaaatcctctctgaaatttttgctrattgttttatataaaaatgtaagggattctctctgaagcatctcagttattatagttagttttgccttacttgaaaaaccttcctgctcataaactacctgcctttggccaggcgtggaggcttacgcctgtaatcctagcactttgggaggcctaggcgggtggatcacgaggtcgagagatggagaccatccaggctaacacggtgaaaccccgtctctactaaaagtacaaaaaattagccgggcgtggtggcgggcgtctgtagtcccagctactcgggaggctgaggcaggagaatggcatgaacctaggaggcggagcttgcagtgagccaagatcgtgccactgcattccagcctgggcgacagagcaagactctgtcttaaaaaaaaaaaaaattctgccttctcagagccaaaggactatagcagcccgaaagaaacgccatattccctgaacatcagaaacttcagattcaggataaataacaaattactaagtagttatcatttgtgttttctagaacacgaagtgacttgttatatagatgtttgttactgttttctaccactctttagaccgtattctttcattggctagattttacttttactttgtctttaatctcaatagcagatgtcttttctaaaaatgttatgtcagaaaaaggaatgaccttgtaagtaatcwtaatacttgtatctgatatttaagaatttgtgctttttagcttttgtagaaaagaatgctgagagagagtcacacagaaaattagtgcagtaattgtcaaggctcttctagacatagtaaacagacctataaagaaaccttcctattctctttgtaaaataatatcctagcttgcttctaaggttggcagtgaaggacagtcactctgtgtgtggaggagcagttggacttttaagcccttatgctgctcccattgtccccacactctgcaaagccccatttccctgagttgtctctcagattctggcaagctttcagatatcagtctcagacggtgtgcctcccttctctgccaccctgctgctttcagcagactatctcttcataagcactgataagactgctaatttgtcaagactaccacaggccccaaaccccaggaattccagtccataaggagtatagctggttttggaacccaccctccataaaggttgtgttcccacgagattgtcacaaagtagtttttattcaggttagatatacatggcataaaatttgctcttttaaccattcagtggcattaagtacattcacagtgttgtacaaccatcaccaccatttattttcagaactttttcattatcccgaacgaagctctgttcacattaaacattaaatccccatacccttcttcctgaagactctggtaagctctatctactttctgtctttattaatttgcctattgatatttcatataagtggaattatacaatattcttttgtgtctggctaatttcacttagcataatattttcagggttcatccatgttgtagcatgtatcagaattttgttcctttttaagactgaataatatttcattgaatgtatataccacagtttgtttatccattcatctgttggacatttacactgctgctaacttttggctattgtgaataatgctgtgctatgaactttgatgtacaagtacctgtgtgaatctctgctttcagttcttgtgggtatatacctagaagtagaattgctgaatcatatggtatttctgtgtctaacttttttgacaaactgccaaactgtttttcacagctgttacatcatttgtcattaccactgtcagttcacaagtgttcccatttctccacatcctcaccaattcttgttattttctggttttggcatgttttgctttgtggcaattgccatcctaatgagtgtgaactggtatctcattgtggttctcattacatttccttaatgactagtgatgttgagcattgattcataatacctgttggccatttgtatatcttctctagaggaatatctattcaagtcctttgcccattttaaattgggttctttgttttttgttgagttgtaggagtcctttatatattctggatattaattccttatcagatatatgatttgcaaatatttattcccattctgtaggttgccttttgactgttagtagtgtcctttgatgtacaacaaaattttaatttttatgaattccacctttttttggttacctttgcttggcacccttgtcagatatcagttgatcataaatgcagatttatttctgggctgtctagtctattccactgatctgtatgtctgtccttattctagtaccacattgttttgattactgtagctttatagtcagttttgaaatcaagaggtgtgagttctccaactttatacttctttatcaagattgttttagcttgtcgttaaattttatttcctgctctgctttgtgattgccttttactaacaacagtggcttaaatttattgagcagagtgccagatactatgttcagcatttaaaatgaattatctcattttatttgcacagcgaccctattaggtattgatagcatccccattatacagatgaagaaactgagacactaaaaggttatttgaactcatgcttgtaactgtgacatcatattacttagttacatttactgcatctgtttaaacatttcctaaagttcaaaagaaatatcactttatagactttatcttaaaatgaagaagtatgcacaaaaaatgaacaataatatgcagcagccctgtttgagcgctttgaaaactgaaaacttagggaggcttgaccctctaaccaaaccctctactgcccatgtgtacctggttgagggaaagagtgtggggctaaactctgagcacatttctcctggccgtgtcttgtgtgtgcccttcctgataagaggaagggttacatccttttataatttgtcctgcagagagggaacacctttattcatttcgtatactcagaagtattactgttttgcaactaacagaaaagaaccttatgagtagcaacagcctacacccaggtaccacctgatttgcataaatatcctatctagattcttaagcttgcatttcccactctcactaggtttctgttttgtttcattttttacctttttggcctattgcaacttttctggaaactaatctacctatttaccaggtgcacgtaacttgtaaaaaaatgatytgcagctgtatcatagcctggtggacacagactttaggccgcctgagatctattcttgtaattcatcctgtttcaagattcataattaaaaataggaacatagtattttgactttttaaaagatttgttgaatctacaaataccaatcatggttattatgatagcagtttgtcctacctgaaggattagtgctacactgagtaaacaaaccaaagtagttcacatttcttaagtaattcagtgatttgttctttatgccctctactttcttgtaagacatcgggcatagacaactgttacacattacaagttgagtgtcccttatccaaaatgcttgggaccagaagggtttcagatttcarttttttggattttagaatatttgcatatatgtgttgatgaagtgtcaaattctgtaaaatatttgaagagattcatttggagccaaatatgagtgaccagtggcctgtgacacagcccttaggagatcctgagaacatgtgcccgaggtggtcaaactacaacttggttttatacattttagggagacataagacatcaattgatatatgtaagatgtacattggtttggtacatctggaaaggcaggaaatctggaagcaggtgccttccaggttataggcagattcaaagattttctagttggtagttggctgagttgttatctggaatcaatagaaaggaatgtctgttttaagataagcagtagtggagaccaaggttttatcatgcagatgaagccttcaggtggcagcttcagaaagaatagattgtaaatgtttctaatcagacttaaagcatctgttctatcagtcttaagatctgctttaatgttaatgctgctcagctgtgtctgaattccaaaaggaaggagggaataatgaggcctgtctgactcccccttcccatcatggcctgagctagtttttcaggttaactttggaatgcccttgccaaaaggaggagtccattcagattgttgtggggcatagaattttatttttggtttacatacataatgagatatcttggaaaagggacccaagtctaaacatgaaagttatttatgtttcatgtataccttatgcccatagactgaaggtaattttagacaatatttttttaaattgtgtgtatgaaactaagtttgtgtacttgagccatcagaaaacaaaggtatcaggtgtggaattttctacttggagcatcatgtgagcactgaaaaagttgcagattttggaacgttttggattttcagattagggatgctcaacctgtagtatatttgacttatctctgaaacatttccttttgagcatgcttagggactctcacaaacactaaaagttctttttaactatagtaactattttcttttagatgataaaataatcagcacatggcctctggcagccttcccttcaaactgacctctttattctttaaacactacccccttctgacagggtgtctcatagatcatcttgattcttttttctccaaatgtggaacggcctattcaccaagttttttttttgtagaaaatagtgctaatgaccaaaatctgggcattagatgtgcacttcatattgtttcatataaaatattcagagtagaaaagagtgaagacagagcaagaaaaaattttcttcttttaaaagggcatatatttatgttggtagttctaattaacctctacctttatttcatctctttaaaccagtttcctccttttccattatatgatcttactcaataatgtgttcaaattacaattttggtcctcccttctgcactcccgccaaagttaaaaggctcttcttcttttgtaactcttggcactagtgccctggtattgcattcaaagtatgcaggttctgactgtccccttgtcagcatcatttgtccttcagctctctgaaaagaaaaagacattgcaaaatttttcttacggaatactaaagtatataatgcactcatagatttccataaacttagacgtagcatgaagggaacaaagacagtttcaaggttttctggatttaaccaaaactctccttttgctttgcactttgatggtaacaatgtcatttatcttttattacagccagctttggtgttgaaatttcacatataatgtgttcattcactgttgtagcagtcaactttttaaaagccaatttaaaatgacagaaaatatgcccaaagtaatgttaagaatcataatcataatagatctttaaaatttaaaaaacttaaagtataataatttctttaggtacatattgtcgtaacattgtctcattcagtaagagtcactccataaaagacatcaagacatttggatcatagcatattttcattatagtttttatatagttgtcttacattcttgatcaatctctagaggttttcttttccacatgagtatggagaatttagttaatttaactgccaagagtagccttggtgacaataatacaattttagggtgaattaaaacatgtcagtctcctaatctcataagctatgattttcatattatcttcatagaagggaaaaaacccacaaactcactttttcctcgtgacttggtaaataggtttcaataagatcatagatgcaaaatatcattggccttccatatccaagggttccacatgcctggattcaactaaccatggaatgaaaatactcaaaaaaagaaaaacaataaaaaaatacaaattttaaaacaatataacaactatttacatagcatttacattgtattaggcattacgtgtaatctagagatgatttaaggtatatggaaggatgtgagtaggttctatgcaaatactatgccattttatgttagagacttgcatattcttagattttggtatcctcggggagtcctggaacctatccccctacagatactagggggtgggtatatcttttgccaaaatcttatcagtatcagaatgaccacagataatgctttcatcttggaccctagcaaagcctggggccgtcgtatctttttttgttaatttctttttttcttcttttttttttcctgtggtttttcagagatagccctcatcaagtgctagagcactacttcttaaactatccatagtaagagaataacattttttccttaacctgttgccaatcaatatgttgtcctactcctatgactaatatgtatctttttttttttgagacagtctcgctctattgcccaggctggagtgcagtggtgcaatctcagcttaccacaacctctgcctcctgggttcaagcgattctcctgcctcagcctcckgagtagttggcactacaggcgtgtatcaccatgcctggctaatttttgtatttttggtagagatggggtttcactatgttggccaagctggtctcgaactcctgacctcatgatccacccacctcaggctcccaaagtgctgtaatatgtattttgtactacatgtggcacaccacaggagtttgatgaaccccaagctggcttataccatgttcagtgaaatgagactgatacatgctcaaatgtcatggccatgtcaaattactgcaagttgttgaacacttaatttctgtacttataggttattaacagtcttcagaccacaagtttagttgcactgtagttgagagtctcattttgtctgtctaggcacacttgcttttagtcaggaaaagtggcactgcttgaaggctctgtatgattctgagctccattgggaatgggagttctgattgccctttccaaagagctgccaaattctcaccctcagctgcctttgggtcaagataaggcctgtttcccctttggggctagactcctctgcacctatatcttcctttctcttttcttcctcagactgagtaagctcattgacttaccttcaaattcattaattctttcttctaactgctcaaatatgctgttgagctcctctcattaattttttatttcaattattatacttttgaattccaaaatttttatttggttctttttgtaatttttatctgtttattgatttgtcttcatgccttcctttatttagacatcgtttcttttagctattggaacatataccctaaattcctctgttttattcatccatctgtgtgtgtctcttaattctgtcaccttttctctgaagccactgcctctgacttagttcagtccacaataaactcatacctggattatctgaattactgtagaaacctaatttcttcaagtattatttgctccagactttctctcctttcctcttggatttttagttacctatatgctagatctttttcatatattcctaatctctctcacactttgtttggtttgtttattcttttctttgtagtttagttactataacagttgatctgttgtcacgtttactaatccctgtctcttctgcgtacagtctgcaattaaacccacccaataagttcttagagttcttaattataaatattatattttaaaaaccttaaatatctctttgattctttttaaacagattttagttctgtcaaaatttttctttttagaaatttttgtgctttttaaaaaatatattgatagttattttaaagtccttgtctaagtaatctttggggttttttattgtctttttttttttttcctgtttcatttcaatatttggtccttttctctttgcatgacttttttttttttttgtgagagccagaaattgatgaaaagctgtagaagcaaagagctaaggtttgttctggtagcctcagtgccagatgctcacttgcttctgttgaagcttgtttttaggctttgtgaaggctctactatttttgtgtcttacttctaggatctggccttactgggtctcaaatgaaagtctacagtgtatatagtactatatagtacttggactttggtctctgtcttctcagtactattttatagctgtggtttcaacctctccgtttctctttccttctggcttttgtagaggtgttaccatgtatatgtgcaggataggagtcagcaaatgacttgagaggaatttgtatggagatttttctggtttcctgcagtttccttctctcctaccctctcaccctgcatcctgccctcaaatctcagcactttggcagcccgtactttgacttctgctttccaactcagtatttctccaggacgcaatctggggacccagggatgaagtttaggtgaatgtggagcttgctgcttatgcctcctgctttcaaggaccataatgcctcacttcttgattggtggttgcttccccgaccacatgcctctaaacagcagtttatatgttttctccagcttgtatagtggattagaacttgatttctaagatgttgattttataatttaatttttataagccattttattttccttatatccaagcctttaaattgagaggggaggtggagagggcttcatttactgctgataattaaaataaatattcatctctcttaagtggtttatggagagtaattttcatacaattttacgttgggatatgaaaaacaaacacaagtgaaaggaattgtttttgagagaaggcttaatgtaaaaggctacacaagtataaaattgttgcacataatgtattccttaatttagagaatattaaactagytcctctatttaatcagaaatatagaaaattctatgtatatttttatttatcacgatatagtaaaaatctggctttgaaaatgatttcagtgttaatatagctttcacaagtgtctgcgttcttttctagtggattaatgacttagaaaatgatgatttrtatattacatggcctacaagttgccagaaacttctgaagccagtatttcctggaagtgtaccttccataaggcgcaattttcataatttggtgagttttatattttgattatacatatatatcttataaagatatcagcattctttctggattatccttctgtcaatgaataggcatctgagttgtaaggaagttaagtatttgcctgaagcagcaagcttaggtggcatggctgactgggtatcaacaactagccatgtcactgtattagtccgttctcatgctgctaataaagacatacctgagactgggtaatttataaaggaaagaggtataattgactccccagcatggctggggaggcctcaggaaacttacagtcatggcagaaggggaagcaaacgtgcttcttcacatagtggcaggaaggagaagtatgagcaaaaggggaaagccccttataaaaccatcagatgtcctgagaagtcactatcacaagaatagcatagaggcaactgcctccatgatttaattacctcctactgggtccctcctacggcacatggggattatgagaactacaattgaagatgagatttgagtgggcacacagccaaaccatattagtcacatgttctgcctcttactctttagcccttatgtcattttataataaccatattaatgttacttttacattttttcaaaagaatttatgacagaactttttcttctttattaaaaagaactaatgattaaagtgtagtaattttagggaaagatacataaataccactttatcatctatgcatataattttattagcccaataatatctaaacattaatattggaactttgaaagttggagaaaatacctacggctgttttttcacataggaaatgaataagatattttttgcagcagtcttgataaagcagttatgttaatgctatttttttttggtcaaaattcaatctctatttccttttgaaaaaatttatcatagaaaatctaatgaacatttagaataaggtatttcaattcaggcaaaataaaatatactgggcttccaaaaagaagatgagtagcctgatgttaaattccatgtataattatgtttggatgtgcagcttttagaaatccttcataaattgtgaaatcctttatatgtgtgtgtgtgtgtgtgtgtgtgtgtgtgtgtgtattccttagaattgctagaatttctttaaaaattacacattgaatttcatactttcagtcacaaaaattagtctaaacttgaatttcatgaagattctaaggtgttgaaatagtgatatatactatctttcttttaggttctgtttattgatccggcccaagaatataccttggattttataaaacttgctgatgttttctattctcacgaagttcctcttaggtaattgtcattttatagcattaaactgtcaactaaaggaaattcaatgttattcatattgtgttacacagagtattaatagggcattcaaagcgatggttagctctagtgcctgacataacacagctgcacgttgtgaagtattatatacctttatgttagactctgtttatcaaatctgtctggtaatgttgtttattacctttctgagagaataatctgatcactctggaaacttatagaaaggtccagcttcatatgcttgtaatcccagcactttgggaggccgaatcaggcagatcacgaggtcaggggttcaagaccagcctggccaatatgatgaaaccccgtctctactaaaaattcaaaaattagcaaggcgtggtggtgcgcacctatagtcccagctacctggaggctgaggcaggagaatcacttgaacctgggaggcggaggtttcagtgagcctggattgtgccactgcactccagcctgggtgacagagcragactcttgtctcaaaaaaaaaaaaaaataaaaagagtatatttaccctttttgtacaaaagaacatggccatttgataatgttagcactagagggagagagagtgatattttataggaatccagtagctatgtggattttggtgaataggcattacattcaaacttttgargtgataaaattctccttttctctgtctattaatacattctctccatctagatattgtagtctaataacgtttctaaataatggtttattgtgattcaagaggtaattataacagtccttrttcatcttcttkttccagaattggttttgtgttcattcttaatacagatgatgaagttgatggagcaaatgatgctggagttgctctctggcgagctttcaactatattgcagaagaatttgatatatcagaagcatttatttctatagtacacgtgagtttatgcactaaatrtgatttgtttagaaggtaaaattcttgcattactatattatgatttctttagaatgtataatttttgcattacatttattgtaacatttcaaagtttataaactgtcatggagattaatacagatgatgaatttgttttctgtaactcccttctgaagtacatattatcctcacattataaattaggcaactgaggttctaccaagatatttgaatttactaaggtttactcagccaataaagtaatttaaattttatatgtaactttagaggaaaacatattaatagaaaatgattatttaagaaaaaattcttgaactaggctttgattaaagagatcattgcaggctgggcacagtggctcatgcctataatcccagcattttaggaggccaaggcaggaggatcgcttgagaccagcagctcgagaccagcataggcaacacagtgagaccctgtctctaccaaaaaaaaaataaaaaattccaggtgcagcggcacatgcctgtagtcatagttactcaggagactgatgtgggaggatcatttgggcccagaaggttgaggctgcaatgagccaagatcgagccactgcactccagcccaggcaatggagagagcctgtctcatggaaaaacaaaaaatcattgcagagttaaatattctgaatgacatagcatataaacacttcctagagactttcaaagaagggggaagtcatttattgacagcaaactgtgtgaaagaggtaaggttgatacagaatctgacaaagagatcatataacagatgatagaaattggtaagaacctgattaaggaagaacaagagatagtaagattatttcgtaattgaggttttgaaattctgttatggatcattgtggaaatatatatgtattaaagagctatattgttgttattaagaaaagtcaagtcatagcttataaaataacttataaaataagtcatagcttataaaatagaagttttttttcatttttatattcattgggctttagcttgtcaatcaatattatatcaaggaatgactcttcttccaactgagaaaggaatttccaaagtagtgcaaatttcctaccctacttctgtaactcccaggaaaatcattaaataccttattaattcactgagctagagtatagaaactacacttcagtgatttggcaggggtacagtttgctctataaaatagtgccatggaatatgcatcaatattatgtctcagcttatttgttttactaacttactggtgtaagagtttataagggacatagtcaatttgagttacatcttttattaagattcaagattcagccattttattgtaaaggatcattatgatattcaaaacttagaaacctgaagatattcagaaattatctttacctaagttatcttaattatcaatattgaatctctgttttgtaagtgttttttatcagacattaatttacatgtgatggcattaatctacagtgttcagcacaatactgttaatatataatctcctggaaaaacaaattatacttgaaaccacagggtttaatacaaagcagcataaaagtaagtattaaatttgtggcacagcctgcaagttgtgctaaacaattagaaggagagggagaaggagaaataatttgaacaaggcatagtttttaggaaaatacatgaattataaaatcttttaaaagtgtttgcctgttttcagtgagctaattaccttatctcaattaagtaatttgaagctatttagcactataaagagagaagaatataagaccaaaataataataaaatatatggaagttattgaaatgtgataacaaatagcaaatattaaagttaatccaaccatatctgtgaccatattaagtgtgaggaaattaaactttagcatactagcagaaaagatataaaaagacagaaagttatacacaaggtgactatcacaaatgaaatctaaggtagccataaaatattaggggaaataaactttaagaaaaagtactaaagttgtatgtagcttcaaaatatacaatacaaaatttgatagcaagggagataaatggacagtttcactataatagtagtaggttatttcaacattttttaataggtgaagcagattaaaaatcagtaaaaatatataagattttaacaatacacttaagattaattttaaaggcaaatataatatccaacaatcagagaatgagatgattttgcattcaaaacagaagaggaaaatatgtcttttagttagaaaaggagttaaaagaactagttaaccattcagaaatgagtaactgatttttaaaaagtagatggaaagtaataagaatatacattaatgaactaggaaataatacaattatgggatcaagaatataaaagttgatattctgaaaaaacaaataaaattgacaaactatcatagaggttaggttccagatgagcacaccaggtataaacttccagactcttaaggcctgggctcagagatgggtacatcattactttcagtttattccgttgtattctgtttatcaaagagtcacagattcagattcatatacccacttctcaatggaaggagtgttgaagaatttggagaccatgttttaaaactagcacagcaaattctaccaaatattcaaatgtttgaagaaataataatttcagtctttaaaatatcttttagagaatagaaaaagaggaaatattacctaaattagtctatgaatctaatataatctgatgtcaaagcctgacaagaagagaaaaggaaaaattataggctgttctttgttgagaatatgtatgccaaagtcctaaataaaatattaacaaaagaaatccagcaggtatataaaaagtaaattatcatgacaaggtgagattatctaatgaataaaagaaagtatttgcaaattcaaagaatctctaaatataattcaccatgttaatatattattcaagaatatgcacaagaaacatttgaaaaaattcaaagcttttttatgattaaaaaactcataaagaaacaaaatgtttagcgaactattatgtaagggaattttgttaattgatgacagcacatcttagcagtaaaatgatagaaagcattgtttttaaaaatggaaaaagataaggtacccactgtcaacacttcaagtataatcctcaagttccagtcaatgcaataagataagtaaaggaaatactcatttaaaatatttaaaagaaacaaatttttatttaaaattccagacttgcctacagaggagactcaaaagaatccattgattgtgagatttgacacaggaggttagtaaagtaactggatatgagatcagtataytaatatcagttgcttttctctcttctaacaacaaatatttattaattattttcatcagttttattaaatgcctactacataccacaccctgttttaggtrcttggataaattaataacatatatagccaacaatccttatcctcatgagagtactttctgtaatgactcctacatttacaatgacaagagcaagcaaataaaagatacttaggaaacctgggggctggggggaaggtcagttttgtggagaaaatttggaattatagccatgaaagtttacctaaatgaatgaaaagctctaccatgtttatcaatagaaatatttcacttcataattatattgttttctgcaagtgatttctaaattcattgcatttccgaccaaagtggaattttggggatttttgtgaaatgtgatgttttattttaaaatttatatggaagaatgaagactcaaaatgggtgagactttgaaggataaagtgatgggacttgtcataccaggtaataagatgtataaagtttgtggtattggttcagggaaagacatatctatcaaaagaacgtgggggtcccaaaacttaagaatacagaagtgacattacagtaaatgggagtggacttacaacaactgtggttcaacagtggctataccaatgcaagtaaataagactttacaccttgtgtaaaaatcatttgagttagcttaaaaatgtaagtgtggaaaacaaaactttaaaacatttagaagttaggacctcaaggtaagggtttcctagataaaacttaaaaagctctaagtctgcaggaaaatactgataatttcagctaaattacaaatgaaaaccagtgcccattaaaatatgtcattaaaaaatagggaaaaatgttataagcaggagaagtatttacaatacatatggccaataaaatatttatattccatgagatgtaaacattttctacaattcaaaaagaaaaataccaatgacccaagaggagaaatgcataaaataacttttaaaatagaagatgcattaatggtaaataaaaatatactgaaattattggtggtaaatatttattaccattaatggtaactaaacaagataattatcttacaaatttgaaaaatgcaaataaagactacgaccacaagattattttataccctgtaatttggcaggaattaagaaagctgaaggtatcatttgttaatgagaatgtagagcaatggaatgcctttacatttacattgctaccctgcctgtaggaatctaaactggcagagccacactgaaaaacaatctgataataattcactatttgaagttaaatttccacatttcctacagacaacacacacacacacacacacacacacacacacacacacacacacaccccctcaccctaagagaagctcttgtacctgcaccttaggaggctattgttagcagaatcattcagaatagcaacaaactatgataaawatacacawatatacatatcagtagcaaaatagataagtagaatttggcatattagaatgaaatatcatatgcaagagcatagatgtattagaaacataatgaagtcatagaagactaacaccataccatatacttcttaaagctcagaagcaaacaaaactaagtatgggaatacktattcgcataaaactctagaattcaaaaaggaaagggaatgataaatgcaaattcaaaacaatgcttgcatctcctgaagcacaaggaaatgggattgggagagaagttgtacttcatggcattggtgatgttccatttcttatgttacgtggtttattcataagaattgtttattttgttatttatgcctcataatgtgtatgttatgtgtattcctctttgcttaccaagttacaaaataatttttaaaatttaaaaatgtgtaagaggattgagttgatatgtctgagtaacttatgtgaggcattctgactaccttattttatgagtatctaatattttcaggtgactagttagtaaaatgactaatctgaatgacttttcctttatcttttgctttattcagagtctcatttttgtgatctccatttatgttttacaaaagatggaacttttcactttttttgagttatgatcacattatgttctactttgataggaggagaaaagttgcccctaaattgaaaaactcgtaaaatgaaactcttcagtctaattacatacctgtgctgctgcttaaaggaatagggtacaaagtttacagtgataaagggagagcaaagaatactaatttcttactgtgaggaatataacatggggatcattttagccacaatatgaagattatgtttggcaataatgacataagtaaattgggaccaaaagcaatattcttcagtgatatatcaaatgctgcttaatagtgtttgtacttactacttgttccttctgcttataagtttctttccccagaatgtcttaatgctagctgagtgttcatacttatgtctcagcttagtcgtctactcaagagatgccatctctcttggtgcaaaacctaaaacagcacctgggtcatagaggatctctaagtacttattaaagaaagaaatgagaaaagataaaaagaataacagcttacattctacaagtgtgtttagaatatttgagactggggaagagtagaggtgcagagaaagtttagtcaaaatacttactagtaaggcctggcatggtggctyatgcctgtagtctcaactatttgggaggccgaggcaggtagattgcttgagcccaggtgtttgagaccagcctgagcaacatggcaagaccctgtctttacaaaaaatacaaaaaaatttatccagatgtggtggcaagttcctgtaagccaagcccttcgggaggccgcaggaggtggattgcttgagcccaggaattcgataccagcctragcaacatggcaagaccccatctttacaaaaaataccaaaaaatctagccaggtgtggtggcaagttcctgtagtcccagctacccagggggctaggtgggaggattgcttgagctgggaggttgaagctgcagtgagccatgatcacaccactgcattccagcctagtcaatggtaagaccctgtctcaaaaaaaaaaaaaaaaaagaaaaagaaaaaaattacagaaaagcaataaaaaatgaaagcatttctgaaatgtcatattagaatatattatacatacattaaaaaaggtaatcattattttattaagaataatggtgtctggtttcatcaaaatagagtaaaacataaatttgttatgatatttttgaaaactatagaatattttaaaaccatctttattaraagatgatatatggttaaaattatttttatgtggtatgtgtgtatgtgtagttagtatattttgaacttacaaaataaaaatctatctgcatgctaaggaaaaaaaagaaaactaattgctataagaagaaaattaattataatatctaaattttcacagatgtaccaaaaagtgaagaaggatcaaaatatactcactgtggacaatgtgaagagtgttctccaaaatacatttcctcatgctaatatttgggatattttgggaattcattctaaatatgatgaagaaagaaaggtaagttgggacattatgttaagtggagtaggccaggcacagaaagacaaacaccacatgatctctactcatgtagaatctttaaaaaaagtcagactcacagaaacagagtaaaatgggggttaccagaggctggggatggcagaattggggagatattggtcaaaggatacaaaatttcagttagactagagaaataagttcaagagatctattgtacatggtggtgactgtagttaatgacatattttatacttgaaattactaagtacattttaaggattctcaccacaaaatatgagaagtatatgaggtaatgcatatgataattagctttattagctattccacaatgtatattaatatcaaaatgtcatatatcataaacatatatattttttacttgtcattttttaaaaggtgaacaattagagactcaacccagaagattcggaaagagccaaaaaaaaaaaaaaaaaaggcaacaactcaaagaaattttcagagaaagagaaatagtacaaagaaattccaaaaattaatgtataggagccttcattagaagggactcaccaaatacgcaacacattgaatgaaagaggaatgctctggggtatggggataaggaatacttttctgaagaagtgatatttaagcagaatcctgaagcaggaggaaaagttagacaaaagaaaacaagggggttgtaagagattaacattccagtcagaaaaatattgtgttctgagatgtaaaggaattgagagaagctgatgttgctactgtgtagattgaaagcatatgttgttcctgtgttatagggtacagtcgaggagataaggctggagaggcaagcaaggggtctgaatatacagggtcttgtgaacaacatttaatgcactcatgtcagtagaagctcttggcaacagtgaaaaacctgaaaggcattaagtagtgaagtgacagtgacatgcattttttttctaaagagcattctccattgttgagaatggattgttggtggggaggagtaggtgtggtgatatgtattaggaaacataaggtgagagatgtgagatggactagtaggcttttggaagaagtggaggcagagaaaatggacatatttgaattatttaggaagtaccatccaggtgctgctggattggataaggtagaggggagatgagaaattgtcaagggtaactcccagggttcagctgaacaactaactggtagtgttgatgccattgccaagaaggaaaggagtggaggagtttatccttgttaaactataagctttaggagagagtttgcatatcatttacatgcattcataaacctaagacatagtaggtgcccactaaacgtacagatagtatagtacagtggttaagagttcagactcttggtcagacagatctgggtgcaaattccatttccaaaacattgtagctgtgtaacataagaagtgatttaatctctctgtatctgttttatcatctgtaaaattgatgtaatagtagtacttggcttcctagagtatttgtgagaatgttggctataataatgataatacttagtattggatagcaaatgagttatttagtcactttttaactcataagctaaaattcaaatgttgaggaccttcatgatctggcctctgcctacacccctctctaactccgtatctgacagctgtcccccatatttcacaccctgtaaacactgctgtattagtccattttcaygctgctgataaagacatacctgagactgggcaatttagaaaagaaagtggtttaatggacttacagttccacgtggctggggaaacctcacaatcatggcagaaggtgaaaggcatgtctcacatgatggcagacaagagaagagaacttgtgcagggaaattcccccttataaaaccagcagatctcatgagacatattcactgtcacgagaatagcatgggaaagatctgccctcatgatttcattacctcccactgggtccccccacaacatgtgggaaatgtgggagctaaaatttaagataagaattgggtggggacacagccaaaccatatcaactgtgaatttaccattgcataagtataccacactcttacttyccttgctatattctcctcacttggactgtctttctctattttatctctctggcaaatttttattaagcctttaagatttttagtatgactccctaaaagaagacctgtatgatcccttcctctccatactccagcttgattaggtgcttctcctgggccccatagagtcttctacatgcctgtgttttgtctgtctgtatgtgaaccccttgagaaaagactttcagctctataatcacagtatctagcctaatgcaggtggcaggattgaataagtgtttattgaacatataaatacagggataaataagtctctgatgccgataaatgtttggatktttattaagttaatgtcatactctataccaagaatcagcaagtccacccactgcttgtttttgtaaatattttggggacacagccatacttgtttattcatatgtcgtctatgactgcttttgtgctgtaacgagagtggagtcactatgtcagaaactgagtggctcacaaagcctaaaatatttactctctggccctttacataaaaagttttttgactccttgtaggtaaattactttcctttaggcaatgtttggaaaggacagataaagttagcaaaatggatgttttttcctatggcatataaaaatgtggcggtgttccattttcttatgtttattattcaaacaatcatattttgtttaacactctgatattttttaactgaataggctggagcaagcttttataagatgactggcctgggtcctttgcctcaagctctttataatggtgaaccctttaaacatgaagagatgaatattaaagaactaaaaatggctgttcttcaaagaatgatggatgcatctgtatatttacaaagagaagtttttttggtaggtaagcatttataagaaaatacatgatgaatatttataaatgatgtttttattaaaaacttattttaatgacagaagttgatttggtaaaaaatttcyattctgatcatttcatagtgatttttaaaatgatacttttagcagcttaagccacgccaccctgcctgtgcagagactgtggtgcagtggggccctttatactccatgcccaggcagatcttcaggaatctggaacacccactgtcctcgattaggagtttaggctaccccgctccctctgcagagaacttggagccaaggaggtttcccagctccatgcctaggcacacctctagacacctggtggttgcccactgtattctccctcagtgttggtgcttgtgcctgccgttggggtacctgtaggcaggcctgctcagcctggccctgcccatcttgcccaccatgtctgagcagggaggccagaccactgtgcacaccacagatcagcccattgcctgagacaacagagagattatcccagtaacaaggatcaagtatataccctgccatgttggcctcagctggcttttactcataagggctatctactagcttgtaggtcaaaccacamagcccaaagtaaaatcagctgatagaaatgcataggctatagaagcatcacttaaggaatttcaaaatataattgaaagctttatcaatagactggaccaagcaggagaaagaatttcagagcttgaaaaccagtcttttgacctaacccagtcagacaaaaataacaaaaaagaatttaggtcaggcatggtggtttatacctgtaatcccacctctttgggaggtcaattcaagaggatcacttgagctgatgagtttgagaccagcctgggcaacacagtgagacctctgctctacaaaaaaacttaaaacttagccaggtgtggtgatgagtgcctctagtcccagctgctcgaaaggctgaggcaagaggatcacttgagcctaggagatggaggctgcagtaagtcatgatcatgccactgcactctagcctggatgacagagcgagaccctgtctgaaaagaagaatttttaaaaatgaacaaagtgttcaagaaatacgggattatgttaaaggaaccaaacctacaaattattggcattcctgagagaaaaggagaaaaagtaaacaaccaggaaaacatatttgagggaataattcaagaaaatttccctcatcttgctagtgaagtagacgttcagttacaagaaattcagagaacactgtgagatactatacaaggtcagcatcaccaaggcttatagtcaccaaactgtccaaggtcagtgctgaagtaaaaatcttaaaggcaactagagaaaaaaggcagatcacatacgaagggaaccccatcaaactaacaacagtggtctattttcagcattcctaaagaaaagaaattccaaccaagaattttgtrtcctgtcaaactaagcttcataagtgaaygagaagtaaaatctttcccagacaagcaagcactaaaggaattcattagcactaaacgggccttacaagagctctttaagggaatggaagaatggtacaaaaacacacttaagtacatagcccacagaccctataaagcatccacatcatagaaactgaaaagcagacagctaagaacttcacataggatcaaaacctcgtgtaccaatattaaccttgaatataaatggcctaagtgcctcacttaaaaggcacagagtggcaattggataaaaaacaagacccatctgtctgctgtctacaggagacgggctcaaagtaaagggtttgagaattatcatgcaaacaaaacaaaacaaaaccaggagttgctattcttagataaaacaaacttgaaaccaacaatagataattataaagtgttcaacaagaagacttaagtgtcccaaatatatatgcaccaacactggagcacccagattcgtaaaacaaatacttccacacctatgaaaaatcttaaggcagctgcgcaataatagtgggagacttcaactcacccactgttattgaactaacccagtcagacaaaaataaaaaagaatttaggccagaaatggtggttcatgcctgtaatcccaccactttggaaggtcaatccaagaggatcgcttgagctgaggagtttgagaccagcctgggcaacacagtgaaacctctccacaaaaaacttaaaacttagccaggcgtcatggtgggtgcctgtagtcccagctactcaaaaggctgaggaaggaggaagacagcagacagatgagtcttgttttttatccaacttgccactctgtgctttttaagtgaggcgtgtaggccatttatattcaaggttaatattggtacatgaggttttgagcctgtcatgaagttcttagctggctccttgccatttctatcgtgtgttagacactgacagtgttagacagattatcgaggcagaaaactaacaaattctggacttaaatggacactgatcagttagacctaatagacatctacagaacattccacccatcagccacagaatatttattcttttcagctgcacacagagcatactccaagatcaagcacatgcttggccataaagtaagtctcaataaattttttaaagtcagaatcataccagtcatactcatggaccacagtagaataaaaatagaaatcagaactcagaacatctctcaaaactacataattacatggaaattaaataacttgcttttgaaatcacttttgggtaaactgaaattaaggcagcaataataaaaattcaaataaatgaaaacaaacaacatacgaagatctctggcatgcagcaaaagcagttttcagagttatagtgctaaccacctatctcaaaaatttagaactatcaccaggcgcggtggctcacgcctgtaatcccagcactttgggaggccgaggtgggcagatcacgaggtcaggagatcgagaccatcctggctaacacagtgaaaccccatctctactaaaagtacaaaaamaaattagctgggcctggtggctggtgcctgtagtcccagctactctgggggctgaggcaggagaatggcatgaacccgggaggcggagcttgcagtgagccgagatacagccactgcactccagcctaggtgacagagcaagacttcgtctcaaaacaaaaaacaaaaacaaaaaaatttagaactatctcaaaataatgacttaacatcacaccaagaggaattaggaaaaacaagaatgaactaacctcaaagctagcagaagaaaagaaataactaaaatcagagcagaattgtacaaaattgagacccaaaaatttatacaatgaatcagtgaaaccaaaagttagctcttggaaaggacaagatcgatagaccactagctagattaacagaaaaaggagaaacgatctaaataagcacaatcagaagcaacaaaggtgacattacaactgatcccatagaaatacagaagatcctcagaagacctctatgcatacaaactggaaaatctagaggatatggataaattcctggtctcccaagattgaatcaggaagaaattgacaccctgagcagactgatactgagttccataattgaatcagtaataaaaaacctaccaaccagtaaaagccctggaccagatggattcataactgaattctgccagatgtataaagaagaactgttaccaatcctactgaaactattccaaaaaaccaaggaggagtgattaatgcctccctaactcattctgcaaaacctgtgttatcctgataccaaaacctggcaaacatgcaatgaaaaaactacaggctagtaccattgatgaacatagatggaaaaatcctcaacaaaatactagcaaactgaatccagcagcatatcaaaaaattaattcaccgtaatcaaataggcttcactcctgagaaaggttggttcaacattaacaaatcagtaaatgtcattcaccacatacacagaatttaaaacaaaaaatgtgatcattttgatagatgctgaaaaattattcaataaaatcaaacatcccttcatgataaaaaccctcaacaaactgcattgaaggaacatacctcaaaataataaacgccatctatgacaaacccacaaccaacatcatactgaacagtgaaaagctggaaacattccccttgaggactggaacaggaaaaggatgcccagtctcactattcctattcatcatagtactggaagtcttagagcaatcaggcaagagcaataaataaaaggcatccaaatagtaaaagaagtccagtatctctcttcactgatgatatgattctacacctagaaaaccctaaagactccaccggacaactcctagaactgataaattacttaagtaaagtttcaggattcaaaattaatgcacagcaatcagtagcatttctatagaccaataacattcaagctgagagccaaatcaagaatgcagtcccatttacaatagccatacacacacacacacacacacacacacacacacacacacmcaaataaaatacctaggaatacagctaactaaggagatgaaagatctctacaaggataattactaaacactgctgaaagtgatcatatattatgcaaacaaatgggtaaacattccatgctcacggattggaagactaaatattgttaacatggccatactgcccaacacaatctacagatttaatgctattcatatcaaactgccaatgtcattattcacagaattggaaaatactattctaaaattaatatggaaccagaaaagagcccaaatagccaaggcaattccaagaaaaagaacaaatctgaaggcrkcatattgagaggtgacaaygtgctggtggcccttgctcactctcagcacctccttgccctcggcgtccgctctggccatgctcgaggagcccttcagcctgccactgcactgtgggggcccctctctgggctgtccgaggccggagccggctccctctgcttgcggggaggtgtggagggagaggcgcgggygggaaccagggctccgcgccacgttcatgggccagcgcgagttccgggtgggcgtgggctcagcaggccctgcactcaggccggcgggcgctgccggcccgggcagtgaggggcgtagcacccgggccagcagctacagagggtgcgctgggccagcactgtgctcgaattctcgctgcctcatctgcctccccctgggtcagggcttgggacccgcagcccgccatgcctgagcctcccccccacccccaccccaccccaccctgccccggcaccgtggggtcttgcgcagcccgagcctccccgacgagtgctgccccctgctccgcggcgcccagtcccattgaccgctcaagggctgaggagtgccggtgcaaggtgcgggagtggcgggcagctccccctgcggcccaggtgtgggatccactaggtgaagcccctgggctccagagtctagtggggacttggagaacctttatgtgtagctgagggattgtgaatacaccaatcagcactctgtgtctagctcaagatttgtaaacacaccaatcagtaccctgtgtctagctggaggtttgtaaatgcaccaatcagtgctgtgtctagctcatctagtggggacttggagaacttttgtggctagctcagggattgtaaacacaccaatcagcaccctgtcaaaacggaccaatcagctctctgtaaaacagaccaatcagctctctgtagaatggaccaatcagcaagatgtgggtggggccagataagggaataaaagcaggctgcccaagccagccgtggcaacccgcttgggtccctttccatgctgtgggaggtttgttcttttgctctttgcagtaaatctttctgctgctcagtctttgggtccgtgctgcctttgagagctgtaacactcaccataaaagtctgcaccttcactcctgargccagcgagaccaccaacccaccagaaggagaaaaccccgaacacatctgaacatcagaaggaacaaactctggacactccatctttaagaactgtaacactcaccgcgagggtccacagctttattcttgaagtcagtgtgatcaagaacccaccaattccggacacagtattacccaacttcacagtacactatgaggctacagtaaccagagcagcatggtactggtacaaaaatagacacatagactaatggaacagagtagagaacccagaaataaagccacacacctacaaacattttagctttgaaaagttgatgaaaattagtgggaaaagggtcctcgattcaataaatggtcctaggatagttggctagccatatgcaaacaaaactggacccctacttttcaccacgttcaaaacttaacaagatggattaaacagttaagtataagacttaaaactataagaattctagaagaaaacctaggaaacaccgttctggacatcagtcttgggaaagaatttatggctaagatctcaaaagcaattgcatcaaaaacaaaaatttgacgagtgggacctaattaattaaagagtacaacaaaagaaactcgcaacagagtaaacagacagcctacagaatatacagaaaatattcacaaactgtatatccgacaaaattctaatatccataagtagcaaataaatcaagcaaagaataaataaccccattaaaaagtaggcaaatgacattaacaggtacttctcaaaagaagacacgcaggcggccaacaagcatataaagaaatgttcaacactactaatccttagagaagtgcaaatcaaaaccaaaaggagacaccatctcgtaccatttagaatggctgttattaagtgaacaaacaacagatgctggtgaggctgaggaggaaggggaacgcatatacactgttagtggggatgtaaattagttcagcccctttggaaagcagtttgtagatgtttcaaagaacttaaaacagaactaccattcaacccagcaatcccattactgggtacatctccagaggaaaataaatcgttctaccaaaaagacacatgtatgttcactgcagcactattcataatagcaaagatgtagaatcagcctaggtgtccatcagtggtggattggttaaagaaaatgtggtgcatatatacaccatggaatactacgcasccattaaaaatgaaatcgtcccctttggagcaacatggactcagctggaggccaagcaaactaacacagaaacaggaaaccaaacactgcatgttctctcttatgagtgggagctaaacattcggtactcatagacataaagatggcagcaagagacactggggatttctagaggggagagggaaggaaaaagtcagggaagggttggaaaactatctggtactatgctaactacctgggtaatgggatcagtcataaccccaacttcagcattacatgatacacctgtgttgtaaccaatctgcatgtgtaccctcgaatctaaaataaaagctgaaattctttaaaaatatatttaattaaatttatcttaggcataattgcatctaaaattgcttaattggaaaaagttgtaatttttacaaggaaatgtattctccctccccctctccctcatctccctctgatgccaagccgaggctggactgtactgcctccatcttggctcactgcaacctccctgcctgattctcctgcctcagcctgcctagtgcctgggattgcaggcgcgcgccrccacgcctgactggttttcgtattttttggtggagacggggtttcgctgtgttggccgggctggtctccagctcctgacctcgagtgatctgccagccccggcctcccgaggtgccgggattgcagatggagtctcgctcacttagtgctcaatgttgcccaggctggagtgcagtggcatgatctcggctcactacaacctccacctcccagccgcctgccttgccctcccaaagtgccgagattgcagcctctgcccggccgccaccccgtctaggaagtgaggagcatctctgcctggccgcacatcatctgggatgtgaggagcccctctgcccagccgcccagtctgggaagtgaggaacacctcttcccggccgtcatcccgtctaggaagtgaggagcgtctctgcccggctacccaccttctgggatgtggggagcgcctttgccccgctgccccgtctgggctgtgaagagcacctctgccccgccgcgaccccgtctgggaactgaggagtgtctctgccccgccaccaccccgtctgagaggtgaggagcgtctctgaccggctgccccgtctgagaagtgaggagcccctccgcccagcagccgccccatctgggaagtgaggagcccctccgcccggcagccgccccgtccgggaagtgaggagcgtctccgcccggcagccgtcctgtccgggaggtggggggcagccctcgccaggccagccgtcccgtcggggaggtggggggcagcccctgcccggccagccgccccgtccaggaggtagggggcagcccctgcccggccagctgccccgtccgggaggtggggggcgcctctgcccggccgccaccccgtctgggaggtgtacccaacagctcattgagaacgggccatgatgacgatggcggttttgtcgaatagaaaagggggaaatgtggggaaaagaaagagagatcagattgttactgtgtctgtgtagaaagaagtgggcataggagactccattttgttctgtactaagaaaaattcttctgccttgggatgctgttaatctataaccttacccccaaccccgtgctctctgaaacatgtgctgtgtccactaagggttaaatggattaagggcggtgcaagatgtgctttgttaaacagaccctgcaaggcagcatgttcgttaagagtcatcaccactcccgaatctcaagtacccagggacacaaacactgcggaaggcggcagggccctctgcctaggaaaaccagagacctttgttcacaagtttatctgctgaccttccctccactattgtcctgtgaccccgccaaatccccctctccgagaaacacccaagaatgatcaataaatactaaaaaaatttaaaaaaacaacaaaaaagcaaacaaacaaacaaacaaaaaaattcagtgagttaattaatgagaattgtcctgctcacaataggtgctcaagaaatggttactaccatgattctggttgtgaagtgaaattgccaacacctgagacagagctcattaaatgtttaccaaactgaagaataaaaaaaaaaaaaaaaaagaaagaaaatgtattgtaataattctaaattgcttatttatttttgattaagtaatctttgtgttatctgcatactttttgaaacatggatataaattgcctgtattatctaaataacatttttgtttttttagggcacattaaatgatcgcacgaatgcaattgattttctaatggataggaataatgttgtaccccgtataaatactttgattttgcgtactaaccagcagtacctcaatttaatatctacatcaggtaarataatcctatactgttctacaaatgtttattgagttgtgaattctttatttatatttaacgtttaatttgaaatttttcagkaactgctgatgttgaagatttctctactttctttttcttggattcacaagataagagtgctgtaattgcaaagaacatgtattatttaacccaagacggtaataagcatattttatttacctgaattcttaaagtgatagaaacttgtaatgttcataaggcagttgtataataaattttaatatgttgctatttttgagtagaggcctagatttcaattttagagtttgtaaattttttagtatttaacgtgtgctgagaaaacaatgccttctattctaactttgtttatcttatttttgccttttttaaacaaactattttcacctttttaagaaaagaataaaatcttttcagtactatgtaaactatcttataatgtatacagaaaagtacaattaccagatcagagaagataataattcttctgcattctgattaaataayatgcagatattttgcttaaggtaggggttacaaccagaagagaggagaccaagatagtaacacacttgggaaaaaggatttagccaaactgagaagtctgcagtgggaccgtagatttgttagggtacaattaactattcagatagatgaatataattcgaatttggtggtttttgttttgctttgctttgttttgtttggcctgctttgctctagaaataaaaacaagagccaatgagtaaaagattaaagaaggctgattttggtctcagtagggaagtggtaattttctaacagtgagagttcattaaacagatggaatgaactatgttgtaaggggcaaacttttatataggagagagatttaaagcaaaggccacacaaccagttcttgtaaatgctgtagattaaatccgagtttctaccagatggctcctggattactgtctaacagattccatgattttatgttcataaaggagtctggctacatattgctgttttctatatctactaataagcttgattgttacggttttacatatatttgggacataaattttttttttttaaacaaatgtagctagaaggcagatttgcttaccaacactgggagttttatataagcttatataatgagttactcttctaaccggaagctttatataagcttgtataatgaattacccttgtagcatttttatatgtaattttatatgtatttatttttgtatgtatatatatgtacttgcatgtatacattcacacataacattttaaaaatctttgcttttcagaaatattattttaattttttttaatgtgttaactgcacatgttcccctgcttttgttttattttttaaaaaaaaagttaatttgagtaaactgtttgaaactttcagatgagagtataatttctgcagtcactctctggattattgcagattttgataagccttctgggagaaaacttctttttaatgcattaaagcacatggtgagtacctagatattcttactaacaattttaatttatttcaatttaaggaaagcaatatgaagaacatacattaaatattttcccctccatgttaatgtttcagttaagtagacgaaggaattcagatttagtcttcatgtaaaacaggtaactttgctcaggaaaagaaaaacctacctgttttctatgactcgtgacatatattctctggtagtccttgtgatcagacatacacataccacatattgattacaaatagggtattaaacaaagtaagtaactctagaccctaccaccacttcagtgacccgaaatccactatttaccaacaatagctagtaatagcaatttttggtcacataattaagcagcattttctttccctgattatttaagaaaaactaagtaaatttatctcactgaagaatattttaagccttaagtcaacattaaatttcttgttattgattataaaccagtatacttcaagaggatatatttctgtatataaaagtagtctttcataactgtctgtatttctaagttaatatataagtttatctagataaaaaatacttaagaaacataaaccaaaatattttatgaaattgtttttatattagctaagtataaatttattgctrtataacaaattaccacttggtggtaaacagtgaacatttatcttaacagtttctgaggttcaagaatttaggagcaatttacctgagtgattctatcttagattctcttataaggctatatttaagattttggttatagttgcagtgatccgaaggcttcactggagcaggaggacaagcttctaagatgactcacttacatgccactgcaggagtcctcagtgtttcactggcttttagcagagtgcttcattccattgccacatagacctgtttttggtgttacttaagtgccctcacaacgtggcagcttcctttttccagaacaagggtaaagagataaagactgagccacaatgtcatttataatctagcctcaaaagttacacacagtgttttctgtttgttgagcaaataacttctattcagtatgaaaggtgctttacagggcatgaataccagagatggggatcgttggggccatcttggagactagctaccacgttaagaataaataatacttcttaaattaagcatttttatttcatattacaccatgtcagaatgcatttaggctttactcagtagcctgcagaccggaaaatttcaaaaaaaaaaaaaaaaaaaaaaaaaaaaaaagctgtttgggatctattacatctattgggagaaattaacttttgcctgctgtttcttctcaagcggttctgggtgtgtatattctttcagaggctcacaaactccctttccccagttgtttcartgtgtctagcagataactttctcttgatttagttgcttcttctataactttcagaagtgctatcttttaataattgtttattccttataggatggatgattattttcattgtcccaaagattttcaaaacccaagtatcattagaaccacaaactaaaaacactgtaatatatgaagtgcaataatcatgatgacaagaaataattttggatcccaaaatgctatctgttggaaatataaaaattgaaaaaagataatcattgtctaatcaaatcatcatttcattgtagtttttctttcacccaagtattttacattttttctggttatttatcacatgttccttatagaaaatcggaagtacataaaatcaaagactaacaaggaagaaaaagtaatcacccataaaacctattttaatgtttaggtgtatttcctttctgggttttttatatttatttttacatggttgaaattatcacttacagttttatcaaaattattttcttataatgttaaacaatgttgtgtcaacaagaattcaaatggatacataataaactgtctacatggaaatatttagtaacattgaaaattcaggtggttttgtttttttgctactgttggtattaatgcagtcataaataattttgaatgtgtagcttatcttatttttttattacctctgagaatagtttattaaaaatgactttgtctccactaaaaatacaaaatttgctggacgtgatggcacatgcctgtaatcccagctactggcgaggctgaggcaggagaatcccttgaacccgggaggcggaggttgcagtgagccaagatcacaccattgcacttcagcctggttgacagagtgagactccatctcaaaaaaaaaaaaaaaaaagaatatgctgagccaggcatggtggctcgtgcctgtaatcccagctaatcacgtggctgagatgggaagtttgcatgaggccaggagttcaagcccagtctgggcaacataacaagactctgtctctaaaaaaaatttttttaaaaacaattagccaggtgtggtgatgcacgcctgtagtcccagttatttgagaggctgaggtgggaggatcacttgagcccaggagtttgagactacagtgagctatgatcacaccattgcactctagcctgggtaatagagtgagaccccattaattagtcagtgaagaaaagaacgtactgaatataagggttgttaacatttttagactcccgataatttttaacaaatgactttccaaatggctgttaattttcatagtttttgagaggatctgtcacatcacagtgttgaaagtcttgatttttgttatacctaattctttctgccaatttaaaaacaaagagagtttctttttttaaatttttttgttttgttttgttttattttgttttgttttttgagacggggtctcgctctgtcattgaggctggagtacaatggtgtgatctcggctcaccacagcacccaactcctgggctcaagcaatcctcccacctcagcctcctgggcagcttgggactgcaggtgcatgccatcacacccagcaaatttttgtrtttttttgtagagacgggttttgccatgtcatccaggctggtgtcacactcctgagttcaagtgatccactcgcctcagcttcccaaagtgctgagattacaggcgtgagccactgtgcctggccaaagatggcttcttatttgtatttatttgataagtagttatagggaaaatttttctttcaatatgactttatttatttttagctttgattccaggggtacatgtggagatttgttacatgggcatattgtgtgatgctgaggctggagcttctaatgattctgttctccaagtagcaaacatagtacctgataggtagtttttcaactctcgtggcccccctttctcccttcccatccccttttgtagtccccagtgtctactcccatatttgtgtccctgagtatccattgtttagctcccacataagtgagaacacgcagcatttgattttctggttttgtgttaattcacttaaaataatggcctccagccgagccaatgttgctgcgaaggacatgatctcattctatcaatcaatgtgtagattgatttcaatttgcacatattgtgtagtattccatggtgtatatgagtcacattttctttattcagtccaccattggtgggcacctaggttgattccatgtctttgccattgtgaatagtactgtgataaacatgagtgcaggtgtcttttttggtagaatgatttatttttctttggatatatacccagcaatggagttgttgggtcaaatggtagttctgtttttagttctctgagaaatgtccaaactgctttttacagtggctgaagtaattttcattcccactgtgtttaggcattccctttttctctgcaaccttgcgagcatctgttatttttttgactttttaataataccaattctgactggtatgagatggtatctcattgtggttttgatttgcatctctctgatgagtagtgatactgagcattttttcatgtttgttggctgcttgtatgtcttcttagaagtgcccattcctttgctcactctgtaatggggttgtttttgtcctcttgatttgtttatggaagatttttctgtgtttactagccagttaatgtttcttttttgaataaatatttttctgtaacttcgtgtagtgttcttgggggaaaaaaaattcacagtgtgaatctctacccactattctgtccttccaagtgggagaggcatgctaacactgcttcctatccactatctggaaaacagcaacaacaacaacaaaaatactgtcaccacctttttttttttttttcaactttaagagttatgtgtaggatatgcaggtttgttacacagataaacgtatgctatggtggtttgctacacagttcatcccattgcctagatactaagccctgcatcccttagctattcttcctgatgctctccctccccacaccccctacccccaacagaccacagtgtgtgttgtttatgccattttgtccatgtggtctcatcattcagctcccacttaaaagtgagaatatgtggtgtttggttttctgttcctgtgttagtttgctgaggataatggcttccaactccttctgtgtccctgcaaaggatgtgatttcattccattttatggctgcatagtattccatggtgtatatgtatcacattttctttatccagtctatcattgatgggcatttaggttgattccgtgtctttactattgtcaatggtgctgcaatgaacatacacgttcctgtatccttataatatttaacagaatgatttatattcctttgtgtatatgccaagtaatgggattgctgggtcaaatggtaattttgttttcagttctttgagaaatctccgaactgcttttcacagtggctgacctaatttttattcccactgtgtttaagcattctcttttttctgcaaccttgccagcatctgttcttttacgactttttagtaatggccattctgactggcgtgagatgttatctcattgtggttttgatttgcatttctttaatgatcagtgatgtggagcttttttccccatattttttggccacatgtatatcttcttttgagaagagtctgtttatgtactttgtccactttgtcgtttgtttttttcttgtaaatttaagttccttgtagactctggatattagaccttggtcagatggatagattggagaaattttttcccatttcatagattatgtgttctctctgatgatagtttcttttgctgtgcagaagctctttagtttaattattaatrtatcccatttgccaatttttgcttttattgcaattgcttttggcatttttgtcatgaaatccttgcccatgtctacatcctgaatagtattgcctagattttcttctagagttttaatagtttcgggttttacatttaagtttttagtttatcttaagttaatatttgtataaggaaggggtccagtttcagttttctgcatatggctagccagcacttccagcactatttattaaatagggaaccctttccccattgctggcttttgtcaggtttgtcgaagatcagatggttgtaggtgtgtgatcttatttctgagttctctgttctgttccattggtctatgtgtctcttcttgtaccagtacaatgccatcttggttactgtagccttgtatattttgaagttgggtagcatgatacctccagctttgttcttttttcttaggattggcttgactattcgggctcttttttggttccatatgaattttaaaatcactttttctaaatatgtgaagaatgtcaatgttagtttaatgggaatagctttgaatctataaattacttagggcagtatggccattttcatgatgttcgttcttcctgtccatgagcatggaatgtttttccatttgtttgtgtcctctccgatttcctttgagcagtggtttgtaattctccttgaagagattctatacttcccttgttagctatattcctaggtattttattcattttgtagcarttgtgaatgggatggctctctgcctacttgttgttggtgtataggaatgctagagatttttgcacattgattttgtatcctgagactttgctraagttgcttatcagcttaagaagcttttgggctgagatgatggggttttctagatataagatcatgttatctgcaaacaaatgtaatttgacttctctcttcctatttgaataccctttatttctttcttgcgcctgattaccctggccagaactttcaatactgtgttgaataggagtggtgagagagggcatccttgtcttgcgccagttttcaaggggaaatgcttccagcttttgcccattcagtatgatattggctgtgagtttgtcatatatggcttttattattttgaggtatgttcctttaatacctggtttattgagattttaacatgaagggatgtctcattttatcaaaggcttttcttgattgattgagataatcatgtggttttgtccttagttctgtttatgtgatgaatcacatttattgatttgtgtctgttgaaccaacgtcgcatcctggggatgaagccaacttgatctgatggataagcttttttatgtgctgctgaatttggtttgctagtagtttattgaggatttttgcattgatgttcatcaatggtattgacatgaagttttccttttttgttgtatttctgccaggttttggcatcaggatgatgctggcctcatagaatgagtaagggaggaatccctcttcagttttgtggaatagtttcagtagaaatgataccagctcttcattgtacctctggtagaattcagctgtgaatccatctggtcctaggctttttttggttggtaggctacttattrctgcctcagtttcagaacttgttgttggttctgatgccccatatcattgctgattgtgtttattggattcttctctcttttcttctttatcagtgtagctagtggtctattttactactttttttctaaaaacaggtcctggattggttgattttttttgaagagtttttcgtttgtctaactccttcagttcagctctgatcgtggtttcttgtcttctgctagctttggggtttgtttgctcttggctctcatgttcttttaattgagatgttaggttgttaacttgagatctttctagcgttttgatgtgggcatttagtgctataaatttttttattaacactgctttagttgcatccagagattctggtacattgtctctttgttctcattagtttcaaagtaattcttgatttctgccttaatttcattatttactcaagagtcattcaggagcaggttgttcaattttcatgtagttgtgtggttttgagtgaatttcttaatcttcagttctaatttgtgttgtggtctgaaagactgttacgatttcacttattttgcatttgctgaggaacgttttacttccaattatgtgatcgattttagagtaagtgccatgtggcaatgagaagaatgtatattctgttgggttttggtggagatttctgtaaatatctatcaagtccacttgatccagagctgagttcaggtcgtgaatatttttgttaattttctgtctcgatgatctgtctaatactgttaatggsgtgttaaggtctctcactattattgtgtgggagtctaagtctctttgtaggtctcttaagaatttgctttatgaatctgggtgcttctgtattgggtgcctatatatttaggatagttatttcttcttgaaccctttacaattatgtaacattcttttttgacctttgttggtttaaagtcagaaactaggattgcaaccccagctttttttctgttatccatttgcttgtaaattttcctccatctctttattttgagcctatgtgtgtctttccatgtgagatggatctcttgaagacagcgtgttgatgggtctccactctttatccagcttgccattctttgtcttttaattggggcatttaacccatttgcatttaaggttagtattgttatgtgtgaatttgatactgtcatcatgatgctagctggttattttgcagacatgtttatgtggttgattcatagtgtcactggtctgtgtacttcagtgtgtatttgtcatggctgccgacggtttttcttttccatacttaatgcttccttcagaagctcttgcaaggcaggcctggtggtgatgaattccctcagcatttgtttctccttcacttatgaagcttagtttggccagatatgaaattctggaaattcttttttttgggaattctttaagaaatgaattggaaattattttctttaagaatgttgaatattggctccaatctcttctggcttggagggtttcagctgagaggtctgctgttagtctgatgggcttccctttgtggatgacctagcctttctgtctggctgccccctaacatttcttctttcatttcaaccttggagaatctgatgattatatgtcttgtggttgatcttttcatggagtatcttactggggttctccacatttcctgaatttaaatgttgtcttttcctgctagattggggaagttctcctggatgaatatcctcaagtatgtttttcaacttggttctgttctccctgtttctttcaggtaccccatcagtcacagctccttttacataatcctrtagttctcggaggttttgtttgttccttttcattcttttttgtttaatgtgtctacctgccttatttcagcaagatagttttcaagttctgaaattttttcctctgcttggtctgttcggttattgatacttgtggttgcattgtgaagttcttatgttgtgtttttcagctccatcaggtcatttatattcctctctaaactgattgttctcgtttacagctcctgtaatgttttatcatagtgcttcgtttctttgcattgggttagaacatgctcctttagcttagcgaagttccttattacccaccttttgaagcctacttccatcacttcagccatcttggcctcggcccagttctgtctgcttaggggagaggtgttgcagtcatttggaggagaagagacactctggccttttgaattttcagcatttttgctttgattttttctcatctttgtgggcttatctacctgtgatttttgagattgctgacctttgaatggggtttttctggagtcctttttgttgacgatgattttgttgctttctgtttgtttttaacggtcaagctgctcttctgtagggctgctgcagtttgctgagggttcactccagaccctagttgcttctgtttttcctgtacccagaggtatcaccagtgaaggctgtgaaacaacaaagatggcagccagatccttctggaagctctgtcctagkggggtacagacctattgccagcccaaacacacctatagcaggtggctggagacccttgttgtgagatcttatgcagataggaagaatgggatcagggacctgcttaaagaggcagtctggctgcttgttggtggagcaggtgtgctgtgttggggtggatcatttctcacccagactgtttggactctccagagccggctgagtggaacagctgagtcaaccgaactgcagagatggtagccgcttctcccactgggaactctgtctcaggaagagatcaaagctctgtctttataatccyggctggtgtggctgaagcctctgcagggaggtcctccccagtgaggaggaatggattggggtcctgcttaaagaagcagtctggccatgatcggatagagcagctatgctctgttggtgggggaaccttccttgtctggactgtttggactctccaaagctggcaggctggaacagctgagtcgaccaatctgcagagatggtggccaccctcccccggaagccctgtcccagggagagatcrgagctctgtccttataaccctgactggagtggctaaagcttccacagggataagtgtattttttgcatctaaataagtatgtccttttcatatataatctatttattattcatttactgtctaagtatttgagtgactatgttttcccttctggggatatattagtttacaatattaagatcttttctcttgtgcaggttaaattttagcaggggtagcgtgcatagggagacagacaataagtgatagacatatgtaaattgagttacatgtcaagaagctgagaaatgctatggaaaaagaaaaagaactgggtaagggaaaatcaggagcagagagtcaggttgcagacagattacaattttaaataaagttggcaggatacgcctcattgagaagatgacatttcagcaatgacctgaaggaattgagggaattaacaattcaaatactgagggaaaatatattcccaccagagtgtctagctgatgcagaggttctaatgcaagaacatactttatgtaagaagacagcaaagtgtatggctagaacacagcaaggagaagagatgagataacagaagaatgaggtgccagataatatcaggcttctaagtgttaggattttaatcattgacccatagaagcattttgtagatcaatattttgcatgtcactttacattttgacatcatttaaattagtgtgtgatgttcttgacagttaaaaaatgtctatatcagaactatcagtcttttaaaatttcttcataatttttatacttaagagttttgcagggggttttttgttcttttgtttttgtttttttgaaagagtctcactcagtcgcccaggctggagtgcggtgrtgcagtctcggctcactgcatcctccacctcctagtaggttcaagtgattctcctgcctcagcctcgcatgtggttgggattacaggcgtgcatcaccacgcccagctaatttttttttttttttttttttttttttttttttttttagtagagatggagtttcaccataatggccagagtggtctcgaactcctcacctcaggtgatccacctgcctcagcctcccaaagtgctgggattataggcaggagccactgagcccacccacttagagttttaattctattaattatcctttctatatatcaaacatactgaagtcaaaacaaaatagtaacttttcacttgtccaaggaaattgacaaatctttaattctctccttttgtagcttgctttcttctgcctttgtaaatttaagtggatgccagtagttttaagaaactttacagtagttgtaaggaatattttaacactttgaatatatcatctcattgccttcttttttttttttattatactttaagttctagggtacatgtgcacaacatgcaggtttgatacataggtatatatgtgccatgatggtttgctgtacctatcaactcatcatttacattaggtatgtctcctaatgctatccctccctcaggcccccatccctcaacaggccctggtgggtgatgttcccttccctgtgtccaaggccctgtgtccaattgatctcattgttcaattcccacctatgagtgagaacatgtggtatttggttttccrtccttatagtttcctgaaaatgatggtttccagcttcatccatgtcccggcaaaggacatgaactcatccttttttatggctgcatagtattccatggtgtatacgtgccacattttcttaatccagtctatcattgatggacatttgggttggttccaagtctttgctattgtcaatagtgccacaataaacatacatgtgcatgtgtctttatagtagcatgatttataatcctttgggtatataagcagtaatgggattgctgggtcaaatattaattctagtttagatccttgaggaatcaccacactgtcttccacaaaggttgaactaatttacactcacaccaacagtgtaaaagcgttcctatttctccacatcctctccagcatctgttgtttcctgactttttaaatgattgctattctaactggtgtgagatggtatctcattgtggttttgatttgcacttctctgatgaccagtgatgagcatttttccatgtgtctgttggttgtgtagatgtcttcttttgagaagtgtctattcatatcctttgcccactttttgatggggttgtttgtttttttcttataagtttgtttgagttctttgtagattctggatattagccctttgtcagatgggtagattgcaaaaattttctcccattctgtaagttgcctgttcactctgatgatagtttcttttgctgtggagaagctctttagtttaattagatcccatttgtcaattttggcttttgttgccattgcttttggtgttttagtcatgaagtccttgaccatgcctatgtcctaaatggtattgcctaggttttcttctaggggttttgtggttttaggtctaacatttaggtctctaatccatcttgaattaatttttgtataaggtgtaaggaaaggatccaatttcagctttctacatatggctagccagttttcccagcaccatttattaaatagggaatcctttccccatttcttgtttttgtcagatttgtcaaagatcagatggttgtagatgtgtggtattatttctgagggctctgttctgttccattggtctatacctctgttttggtaccagtaccatgctgttttggttactgtagccttgtagtatagtttgaagtcaggtagcgtgatgcctccagctttgttcttttggcttaggattgtcttggcaatgcaggctsttttttggttccatatgaactttaaagtagttttttccaattctgtgaagaaagtcattggtagcttgatggggatggcactgaatctatgaattaccttgggcagtgctgccattttcatgatattgagtcttcctatccatgagcatggaatattcttccatttgtttgtgtcctcttttatttctttgagcagtggtttgtagttctctttgaagaggtccttcacatcccttgtaagttggattactaggtattttattctctttgtagcaattctgaatgggagttcactcatgatttggctctctctttgtctgttaatggtgtataggaatgcttgtgatttttgcacattgattttgtatccagagactttgctgaagttgcttatcagctaaaggatattttgggttcagacgatggggttttctaaatatacaatcatgtcatctgcaaacagggacaatttgactttctcattttctaattgaacrccctttatttctttctcttgcctgactgccctggccagaacttccaacactatgttgaataggagtggtgagagagagcatccctgtcttgtgcccgttttcaaagggaatgcttccagtttttgcccattcagtatgatattggctgtgggtttgtcataaatagctcttattattttgagatatgttccatcaatacctagtttattgagagtttttagcatgaagggctgttgaattttgttaaaggccttttctgcatctattgagataatcatgtggtttttgttgttgattctgtttatgtgatggattacayttattgatttgcatatgttgaaccagtcttgcatcccagggatgaagcccacttgatcatggtggataagctttttgatgtgctgctggatttggtttgccagtattttattgaggatttttgcattgatgttcatcagggatattggtctaaaattctcttttttttgttgtgtttctgccaggctttggtgtcaggatgatattggcctcataagttgagttagggaggattctctctttttctattgattggaatagtttcagagggaatggtaccagctcctctttgtacctcttgtagaattcggctgtgaatccatctggtcctggactttttttagttggtaggctattaattattgcctcaatttcagagcctgttatttgtctattcagagattcagcttcttcctggtttagtcttkggagggtgtatgtgtccaggaatttatccatttcttctagattttctagtttatttgcgtagaggtgtttatagtattctctgatggtagtttgtatttctgtgggatcagtggtgatatcccatttatcattttttattgtgtctatttgattcttctttcttttcttctttattagtcttgctagcrgtctatcaattttgttcttttcaaaaaaccagctcctggattcattgattttttgaagggttttttatgtctctatctccttcagttctgctctgatcttagttatttcttgcgttctgctagcttttgaatgtgtttgctcttgcttctctagttctttcagttgtgatgttagggtgttgattttagatctttcctgctttctcttataggcatttagtagtataaatttccctctacacactgctttaaatgtgtcccaaagattctggtacgttgtgtctttgttttcgttggtttcaaagaacatctttatttctgccttcattcgttatttatccagtagtcattcaggatcaagttgttcagttttcatgtagttgagtggttttgagtgagtttcttaatcctgagttctaatttgattgcactgtgatctgagagacagtttgttgtgatttgtgttcttttatatttgctgaagagtggtttacttccagttatgtagtcgattttagaataggtgcaatgcggtgctccaaagaatgtatattctgttgatttggggtggagagttctgtagatgtctgttaggtctgcttggtgcagagctgagttcaggtcctggatatccttgttaacatttgtcttgttgatctgtctaatattgacagtggggtgttaaagtctcccattattattgtgtgggagtctaagtctctttgtaggtctctgaggacttgctttatgaatctgggtgctcctgtattgggtgcatatatatttgggatagttagctattcttgttcaattcatccgtttaccattatgtactggccttttttgtctcttttaatctttgttggtttaaagtctgttttatcagagactaggattgcaacccctgctcttttttctttccatttgcttggtagatcttcctccatccctttatttgagcctatgtgtgtctctgcacatgagatgggtctcctgaagacagcacactgatgggtcttgactctttatccaatttccagtctctgtcttttaattggggcttttagcccatttaaatttcaggttaatattgttatgtgtaaatttgatcccgttattatgatgtttgctggttattttgcctgttaattgatgcagtttcttcatagcaccaatggtctttacagtttggcatgtttttgcagtggctggtactggttgttcctttccatgtttagtgcttccttcaggagctcttgtaaggcaggcctcgtggtgacagaatctctcagcatttgcttgtctgtaaaggattttatttctccttcacttatgaagattagtttggctggatattaaattctgggctgaaaattctttcctttaagaatgttgaatattgtcccccactctcttctggcttgtagggtttctgctgagaggtccgttgttagtctgatgggcttccctttgtcgataactcgacctttctctctggttgcccttaacagtttttttttttttttttttttagtgggcaggaatcttttttattattattattattattattattattattatacttcaagttttagggtacatgtgcacattgtgccggttagttacatatgtatacatgtgccatgctggtgcgctgcacccactaactcgtcatctagcattaggtatatctcccgatgctatccctcccccctccccccaccccacaacagtccccagtatgtgatattccccttcctgtgtccacgtgatctcattgttcaattcccacctatgagtgagaatatgcggtgtttgtttttttgttcttgcgatagtttactgagaatgatgatttccagtttcatccatgtccctacaaaggacatgaactcatcattttttatggctgcatagtattccatggtgtatacgtgccacattttcttaatccagtctatcattgttggacatttgggttggttccaagtctttgctattgtgaataatgccgcaataaacatacgtgtgcgtgtgtctttatagcagcatgattcatagtcctttgggtatatacccagtaatgggatggctgggtcaaatgacaagcaatggggaaaggattccctatttaataaatggtgctgggaaaactggctagccatatgtagaaagctgaaactggatcccttccttacaccttatacaaaaatcaattcaaggtggattaaagacttaaacgttagacctaaaaccataaaaaccctacaagaaaacctaggcattaccattcaggacataggcatgggcaaggacttcatgtctaaaacaccaaaagcaatggcaacaaaagccaaaattgacaaatgggatctaattaaactaaagagcttctgcacagcaaaagaaactaccatcagagtgaacaggcaacctacaaaatgggagaaaattttcgcaacctactcatctgacaaagggctaatatccagaatctacaatgaactcaaacaaatttacaagaaaaaaacaaacaaccccatcaaaaagtgggcaaaggacatgaacagacacttctcaaaagaagacatttatgcagccaaaaaacacatgaaaaaatgctcatcatcactggccatcagagaaatgcaaatcaaaaccacaatgagataccatctcacaccagttagaatggcgatcattaaaaagtcaggaaacaacaggtgctggagaggatgtggagaaataggaacacttttacactgttggtgggactgtaactagttcaaccattgtggaagtcagtgtggcgattcctcagggatctagaactggaaatgcccttaacagtttttccttcatttcaactttggtgaatctcacgattatgtgtcttggggttgttcttcttgaggagtatttttgtgatgttctctgtatttcctgaatttgaacattggcctgcsttgctaggttggggaagttctcctggatgatatcctgaatagtgttttccaacatggttccattctccccatcactttcaggtacaccagtcatacgtagatttggtcttttcacatagttccatatttcttggaggctttgtttgtttctttttagtcttttttctctaagcttgtcttctcactttatttcattaatttgatcttcaatcactgataccctttcttccacttgattgaatctgctattgaagcttgtgcatgtgtcacgaagttctcatgccatggttttcagctccatcacgtcatttaaggtcttctctacactgtttattatggttagccatttgtcttatcttttttctaggtttttagcttccttgagatgggttcgaatatccttctttagctcagagaagtttgttattaccaaccttctgaagcctacttctgtcaactcatcaaagtcattctctgtccagctttgttctgttgctggcgaggagctgcgatcctttggaggagaagaggccctttgatttttagaattttcagcttttctgttgtactttctccccatctttgtggtgttatctacctttggtctttgatgttggtgacctacagatgtggttttggtgtagatgacctttttgttgatgttgatgctattcctttctgtttgttagttttccttctaacaggtccctcagctgcaagtctgttggagtttcctggagttatgctgcaaatcctttttgcctgggtatcaccagcggaggctgcagaacagcaaatattgctgcctgatccttctctttgtcccagaggggcagctgcctatatgaggtgtctgtcggcccctgttgggaggtgtctcccagttaggctacatggggacccacttgaggaggcagtctgtccattctcagagctcaaacaccatgcttggagaagcattgctctcttcagagctgtcagacaaggacgtttaagtctgcagaagttgtctgctgccttttgttctgctaagccctgcccacacaggtggagtttagaggcagtaggcctcgctgagctgcggtgggctgcccctagttcgagcttcccagccgctttgtttacgtactcaagcctcagcaatggtggacgcccctcccccagccaggctgccagcttgcagttcaatctcagacagctgcgctagcagtgagcaaggctccgtgggtgtgggacctgccgtgtcgggcacgggagagaatcaccttgtctgctggttgctaagaccttgggaaaatcacagtatttgggcagaagtgtcccatttttccaggtagtctgtcacaccttcccttggctaggaaagggaaattcccccaccccttgtgctttccaggtgaggcgatgccctgcctgggctgcacccactttccaaccagtcccattgagatgaaccaggtacctgagctggaaatgcaggaatcacccatctgctgcatcggtcacactgggagctgcagactggagctgttcctattcggccatcttggaacgcccccatctgattgccttctggcttctgttgtttctgataagaagttagcctttattgttactgagattcttttgtatacagtgaaaaaagcatttctcttcttttcaagattttagcttttgcttttaacattttgactggtgtgtctggctgtggatatctttacatttatccttattggagtacattgagcttcttaaatttgtaaaytatgttattaatcaaaattgggaatttttcagtagtttttaaaagtatcttctatgtttctttttccttgtcttcctgggtcttctataatgcatatgttggcatgcttaatggtgtcccacgtttctctgagaaactgttcatttttttcagtctttttacattctgttctccagattgtataatctttattgatttatcttccagttgccattccaagttgtttacacagaaaatacatacatagccacatataaattattagaattaattatatagtttaaggttgtttaataccagtcaatgtccaataattaattatatttctaagagctgcaacaaacgagaaatgcagtttaaataaatataccgtttacaatagtatgaaaaatatcaaacactggaaatttttgtggaaattgtcaagcagattcaaaaactcatccagaaattcaaagtaccaagagtagctaaaataatcttaaagcataaaaagtgataattgctttactggatatcaagatctttgataaaactacgtaattgaaaacagtttggtatcagcacaaggatagaaaaatagagcaatggaagaagaatagagaacccagaagtagagccatgcatatattaacacttgatttataacaaagttggctttatggaacagtaagggtaatctttgacacttcccccttttcacgtcatacacaaaaattgattccagatggattatagagctaaacataaaaggcaaaacaataaatcttcttaaagataatgtatactttaaagttcatatggaaccaaaaaagagcccgcatcaccaagtcaatcctaagccaaaagaacaaagctggaggcatcacactatctgacttcaaactatactacaaggctacagtaaccaaaacagcatggtactggtaccaaaacagagatatagatcaatggaacagaacagaaccctcagaaataacgccgcatatctacaactatctgatctttgacaaacctgagaaaaacaagcaatggggaaaggattccctatttaataaatggtgctgggaaaactggctagccatatgtagaaagctgaaactggatcccttccttacaccttatacaaaaatcaattgaagatggattaaagacttaaacgttagacctaaaaccataaaaaccctacaagaaaacctaggcattaccattcaggacataggcatgggcaaggacttcatgtctaaaacaccaaaagcaatggcaacaaaagccaaaattgacaaatgggatctaattaaactaaagagcttctgcacagcaaaagaaactaccatcagagtgaacaggcaacctacaaaatgggagaaaattttcacaacctactcatctgacaaagggctaatatccagaatctacaatgaatgcaaacaaatttacacgaaaaaaacaamccccatcacaaagtgggcgaaggacatgaacagacacttctcaaaagaagacatttatgcagccaaaaaacacatgaaaaaatgctcatcatcactggccatcagagaaatgcaaatcaaaaccacattgagataccatctcacaccagttagaatggcgatcattaaaaagtcaggaaacaacaggtgctggagaggatgtggagaaataggaacacttttacactgttggtgggactgtaaactagttcaaccattgtggaagtcagtgtggcgattcctcagggatctagaactagaaataccatttgacccagccatcccattactgggtatatacccaaaggactataaatcatggtgctataaagacacatgcacacatatgtttattgcggcattgttcacagtagcaaagacttggaaccaaccgaaatgtccaacaatgatagactggattaagaaaatgtggcacatatacaccatggaattctatgcagccataaaaaatgatgagttcatgtcctttgtagggacatggatgaaattgggaaacatcattctcagtaaactatcgcaagaacaaaaaaccaaacaccgcatattctcactcataggtgggaattgaacaatgagatcacatggacacaggaaggggaacatcacactctggggactgttgtggggtgggggggaggggggagggatagcattaggagatatacctaatgctagatgacgagttaatgggtgcagtgcaccagcatggcacatgtatacatatgtaactaacctgcacaatgtgcacatgtaccctaaaacttaaagtttaataataaaaaaaagataatatagattatcttttttactttagagtagagaaaggtttctaaaatgagacccaaaacacagtagccatcaggtataataccaataaatggaactactttaaaattaaggactgcttcccattataacacatcatcagtacactacaaaacaagccatagaatgggagaagcatatctctacacatataaccaaaaaaagcccttaagtcttagaaatccaactcctccaagtcaggggccaaaaaagataatccaaaaaatactggaagcagattgaacaggcaagtcataaaagaagccaaagaacatatcaaaggatgtttagtattgttaatgataagagaaaagaaaattaaaaccctgatgagatatctttacatatgtacgagaatgatttaaattaaaatctgacaatacaaagtgtttcttaggctgtgaggtaatggaactgtttgttatctgttgctagtatgtatattactttgaaaaactatttagcatcttctgaagtggaagatatgtatatcctatttttagagctctaaactggaagaaactcagatgtccagcaacagtagaatagataaaagactgtatattcatatgatggaattctgtacagtactaaaaattgactacagctacagaaaacagtattgataaatctcacattattgagtggggaaagaacacaaaataatactgcatgactccatttatatgaaatttaaaattgattaaatgtttagcagtgcaagtttaggggataaactataaagaagagcaaagttgttattaccataaatgacaagagagtggttgtctttagaaaagtgggagggtgtggtaattgacagagatctgcggaatctttttggagttgctggcagtgccagtgaccaggatagtaggtttatgggttaattcactgagctctacattttgttttgtgtattttttatttgtgttatttcacatacaaaaagcttaaatataatgttacattacaaatgaatcattatgcaaatatctgaaggaattagagttagtaaaatgattgttaggctttttcagtggtatatcacatttagtacagtaaacatgggagggctttgatagtgaaagatggtgcatgatacagtgaacaaactggatgggaaagaaaatatattcacctgtaaaatgatatgtatgatactggtctttttaatctataaatatgtttgcagaaaacaagtgttcatagtcggttggggattatttataatcctacatcaaaaataaatgaagagaacacagctatttctagaggaattttggcagcttttcttacacagaagaacatgtttttgagaagctttcttgggcaactggcaaaggaagaaattgctacarctatttactctggagataaaattaaaacattccttattgaggtcagtagctatttgaaatattaaatatgtatgtattgcatattttaaaagtgtgagtgtatttggagatattgttactgaaaaacaatggtagatttaaacaaatgaagataataaacattccttttcaaatgggaaaagataaacattaaatgatatgactctgcacagaggcatttaataaatcagatttcatatgtttcattaactacttcatgattcttaaagttgatggcattctagttaggatatgtacttaagtgaagaattgggggttaaagcgttacgtaaatctcaggtatttcactgaaggggtccattatggggggggtttcaacgatgatcctcttgaagaaacaatcattattcattcaaaaaatacatattgatcgtttatgagacaatggagataaacttgtgaacaagcagatagagtccctgtccctgttctttgtggagcttacattgtaggaggaaagacagacaaaatatttataagtggttttgattgatttgcttccaaaagtcaggtcattagctaaggattagagtggcagtatgtatttttaaagggtcgaggacaaaaagaggaaatgttgaatattttactattattctgagagtgagaaagtaaattaaatacattagtgaaggaagatttctggtcattgctgagggtccacttgagattaatgacaataaattcaaagtgagatcagccttggtcgtatatttttctccaactgtattttactgttttcatccagttgcagactcagcagagttgtgtttaaccaaggctggggtttggaccagtgaatatgactgagagggagcattcaagggagctaaacatggagaagttttggttatagtaaagtaccctgagatagaacttggttaaaaggaaattacgccatgggaaggatgatagacagtgaataaatggtagagtctgtggactgaaagtttgagtaatggttgatctagggatggtgatggtcatgtggttgtggtcagaaaggggatgattgaaatggggattttggaggtaaagatcagggcctacatggtccaacaccacagccactggctacatatggccattttatacttaaataagattttaaattcagttcctcagtcatagtagccacattttgaaagccgcataaccatatgaagccatggctgccatattggacaatgcaggaaaacattttcatcatcatgaaagcatctgggaacttgttagaaattcagaatttaaggcctggattctactgaagtatattctgcattttaataagataccaggtgattggtatgtacattaaagtttgagaagtactgagagagagaaatgtaccttagtatgaaggtgcaatgagcatgtatgtggtttattttctgtgaatgtccatatatttttttactttgaccaagcattacttttattatttccatatttaaatatattattactaaactggtcttctgggattagtataatggggagaaaggagtatttccattttaaacactttttaaattgatagtaccaaataagaggtactgagttcagaatttaataaatatttaatttcattttcttcatatcaaattttatttaaattgatgttccctagtaatttactagtctggtagtttccctgaaattctcaaagaatgaatagcaaactgtatcaacttgtaacaagatttaagcatgttataaatgacttgtcaaaacagaattctttttttaaaaatgttctttcaaagaaaattataccaaataatgattttgaaagtattatttaaaattttatactaatattagttttttaaacaaaatgatttaatatatttactgttctcatattagtttcatcagtcttaacttttgctttaggggatggrtaagaatgcttttgagaaaaaatataatactgttggagtgaatatttttcgaactcaccagttgttctgtcaagatgtacttarattacgtcctggagaaatgggtattgtcagcaatgggagagtaagtagaaaaagctattgctctcttttctcagtgacactgcagtgcactggtctgccttttttctgtcacaattcccctgatgtgactgacacacacagaggacggtgttcatgagctgaagacaccagacacaactcagcataaataaaatggggtcatgacacacttcccattccttcattctttcccccatttaatgagaatgatgatgtgggtaaggaagaatgttctttatgtgtcttgcttttattttgttctaatgtaagtattagaaggaacaacttaatgcacatcttcaaaacattgtcattagaaccactgttgtagtaggtgtagcaagtaggttatgacatctttcttcttgttcctacagttgtgtatgttaaatggcattagatactattttcagttttgaagtatcaagtagtataaattgccatgtagtatttattaataaaatatttacaaggctgtaggaagaaaatctcttactctccaaccaccctaataaaacttaatagcttattgtttttcctttcagcccttttttctaccatacatagatagccatttttggttttttagaatacatccttataatcctactatatataattttacatcatgatttttctgttaatataaatgtttttctgattgcagtctttgtagacacatacaaaataagtggatgatatctatatactaatatttttaatatgatagtcttatttcatacaaattgtttaagtaaaaaactgaatctggtgcttaggtttattaagaaatcaacaaatgcagtgtttttcacgtatctgtggcttgaattttcaaattatatatccctcaatcatcttcaaagttctaatgcactcttaatgttttgtttttcacttacttttgaattctgttcacctgcatattagattcaggttcatctatgtacagtgctattttacacatgtcaaaagctgccatttattgtaaaaagtattggtgaattttggtagtgagatatgtagagctctgtaaatggcattgctttttcactttaaaagttactttgggaggaaatacagcttttaaaaacagttctaaagcttttggctgtctttgaccatgtcaagcattttaagggataaagagggaaacaatggcacctgttttatctagtgccttaccttttagttatatactagggaaaagctatcctatgtcttgtcattttgatataattcatatagtgttattgacattaatgataacaaatactagatacagttatgttcaacttatttctcataaacataaaactatgttttgtcctgactttccttaaaattgataaaaatattaagatattaatcttacacctactgtgaaccaaacattcttctagattctgaaggcacagcagtaaacaactacgttttcatggggctaatattttgatggatagagagagacaacaaacagcacccttactgataaggcatctatcttaagtatgtttatgctgctataaaaatatgccacagactggctaatttataaagaacataaatttatttcttatacttctggatgcttggaaatgtarggcygacgtgctgccatggatgtctggtgagggctgctctctgcttccaggatggctccttgttgctctgtttttacatggtggaaagtagaagggcaacagagtgctcccttcagtcttgaactcttttattataaggatacaaattccattcatgagggcagagccctcgtggcttaatcatctcccaaaggccacacctctcagtgctatcgcactggccactaagtttcaacacatgggttttgagggacacgttttgtcttaatctgttttgtgctgctgtaacaaaatacctgagactatataatctcagaaatctattaaagaacagaaatttattctctcatacttctggaggctgggaagtccaagatcaaggcactggcatctgatgggagctttcttgctgcatcctcatacggcagaaggcagtggggcaaaaaggggatgagtgctatgttcctacatggcaggagagagcaaacccactcctgaaagcctttttatagtggcattagtccattttgaggcacagccctcatgacctaaacacctcccattaggccccagctcccaacastgttgcattggggattcagttttaacataaattttggagaggacaaagacattcaaaccatagcacattcatagcagtgtcatatgggcaaagaaccaaagaaggtgaaggaggaagccaygtcaaatatctggaagaggattgttctagacagagtacagtgaatgcaaaggacgtgaggtgagttcatgtctgtgaatcctgtgaatcatgtctgctattctaagaatagcaggtaggaagagagcaggcaggagagaagccagagaagtagctgggggccagatcatattgggttttataggaagtttaaggactcccactttactctgaatgagttgggaagtgcatagttctgggcaggagattggcatcatctagcttatgttttatttggatcactagaggctgttacattgggaatatacaatagggggtcagggagccagttgggagataatgcagtagtccagatgagagatgatggtggcttggaccagaatggttctagtggtggtagtaagaagtggatatgggatgtattttatgtgaagaatggacaggaattgtccagggactttggtgtgagatgtgagagaactaagttactggcagaatggagttactgtggatcaaggtgaggaaggctgcaggatgagtgaggttgtcaggagcagtataagaagaaggaaagagaattcagtttggacctccaaaaagacttgttaagaaggtgattgaatatgagtgtagtacagaggaaggattggggctggagatagatattaagtcaaattatgttgattttttctgttgactaatggaaaaatgtaatttcaattatccttttatttgtataactgtggttttaatagaaaagtatattggaaaataagtctgtggtttatgagcgataatgtaatacttagcttatcactctgaaagtaatgctgttaagcataataatcacagcaatgtggcagatgttataaaaatttggaatcagatagtttaatgcttgaaataagtatgatattttagtataaatcttcattctgagcctgttcaaatgtttccattagaattggaacatatgaaaagttaaaattgtttataaatgatcaacaactagggtacaatgatgatcacacagtttcttaaaaacactgaataatttaaaattgacatatttaatattaatgccacaaataatgccattgttataataatatttatttgtattacactacatattcacagtttgctgaaagacatggggtagcagggagtagggaacaaaagcagggtcttttttttgttttatagtcagatctggattcaaattccagttgcaccattaattacattacactgtgagacctgatttcttcatttggacaatgagaatgataataatctgtcttacaggattgttggggtgattaaatatgctcctatatttaaagcacatagaaggaacccaaacacagagtaaattttcagtaaatattaactgctattttctctcaatatttgaagggcatcatgaaaaataatgggcatttgtagacttaatttgtgttacactagctaaaagttagcataaaatcaaaactagttgatcaaacttctgtgagtagagagacatttttagctcagtatgtggatgaaaatctgacagagttttctgcaattttcatgacctgtcaaatgaagtaatgcatttctgttacagcaattattctatgtaactgaaaaatcacatttctcaaatgttatgaagaagatttaagcaacataattttcargtttattgttcttttacccaacttggacattatgtgattttatgctatttaagttactttattccacaaattttcagctttaaatagaaccaagacacagaaacattaggtttctcctgtttgatgctgtgcttaatgtaagcaaaatacagccagttttctggtaaatttaatcagtaaagatagccaatgtagttaaccccttaagacaatacttttaagattttatttccttattctaatgttactaacaaaactgcccctgtcgctagaggtagtatagataagattcaactgttttccaagactgctgattcattgttcagaaatgtaacattgaatgtgctttcaaagttgctttaaaaattatatcacgtcttaagacaatgaaatgtttatatgagtacttttagtattatagtgcccatttttgtgtttttaagagcccgtgttttatatttaaggtgaaacatgatatttatttagttgagatgccaaaatcccagttagtcacctttgatatgagaaaatgggatagaaagattcaagaactatgcttcagtaatttttagaaaagatgaactgtaggagcaggtgaaggggaagtgagaaaatctggctacagccattacattctggtctttttaccaagaaaaaaataatctggttgacgtgttttctgattatcattaaatataattgttttgtacataggattatgtcagtctacagtagggttttgtgtacgtggtgttagaatgattgttatgtactaatttcctcagaaagtgctcatggtagtagagtcagtagtggttgtgatgggagagccattctgagaaattaggtatgtggcaatttggcagcttctaactttgtagttactggtttaaagttaatataggtgaccttgctaggctcctaaccatttatacagtatcagttaaaagaagactggttggtattattatagtaagtatgtgatttttatgtgatttttctcttgggttttgctattttatggctttcttataaagtaattcatgtctatatagtgtagagtacaatttatagatgaaggtgaaagaaaattgaaattaaaagatttttaaaaatatagaccattgctttcaaaattgaattcagattgaaatggtatttggaagcatcatgatttatgtttcaaatcacgatttatgatttatgtttcaaatcatgatttatgatttatgtttcaaagtaaaactttctaatggaaataatttgctaattttttatattgtcactttgattttggtgtttatacaaatgttatttgtaatatcaaagtgagaaagtatatcttgtttcctagcgtatttagtaaatggcaggattaatagctaccatatctttaatctctaattcatttttgcttaataaagaaatatctatttgatgaggaaatgtttttcctaaactgatatcttctagaagatatatgataatataactgtttttattttaagttcttaggacctttagatgaagatttttatgcagaagatttttacttgttggaaaagataacatttagtaatttaggagagaaaattaaaggcattgttgaaaatatgggaatcaacgcaaataagtgagtatataagttctaagagcaattcattttgggtttggtattttgagtctaatgtttttaagattagaaaatgtttcaaatatatagacaagtaaaggtataataaaagacatatataaagaatataagcaaataataaaaggcatccatttactcaccatcacaaaactgtagatgttaatgttttctttgccttggctctgtctttctccttgtttcttacccatccaccccagtctcctccctccccaagaggtaaccattttyctatagattgtatgcatggttcccwtatttgtctttttgcttcatgtgtaaatatccattattggtgtttattgtgttgaaggctgtgactgttttagagaaatgctattatacgtaggtctccctttgcagtctactttggtagatttaaccatgttcagatatataaaacctttcttgaagcattaattgtaacatgaaatatggaactctttccaaaaaactcatacactgtttgtcttgtttatctagcatgagtgacwttattatgaaagttgatgcccttatgtcctctgtgcctaagcgtgcatctcgatatgatgtcacatttcttagggagaatcacaggtaagaatgtattcgtatttgtttgtgatttttctgttaatgcatgcaattatttccatttgttttcataacatggtaaaatttaaggtagaattaaaagttatttattagggaataaatgtatttgacagtattaggaagataaattccagttagttatatattctagtaaataaagggtaatatatatggagagagagtgtacgaaatttcaagtaagttaaacatgttataatttgtcatatttttaatatctttcatacttaagatcatttgtaatttttgcagtatctcaagatagtcataaataatattatctttatattttcaatgtgtaaagtgactgaagagttctgattaatcaaatgtagggtggcctctgtcacaaagctaaacacacatgcatgcgcgagagttcaaaggagtgaagagagggtccaggcaaagctgaactgttgtaggcccggctgctgcctcaggccagcaaggtgaatcagcagatcagcagcaagtgtgtgagctgcaaaattgctgctgctgcctctctgttctctagatctcctgagaatctctgttgttgcccgcccaagcaagaaacattctggaaaatatgatttagcctggtcaagttgacacattataaagctgctgcgtggaccaagggtccaaggatttactctgtcaggctcctgtggtaggatggaaataaaaggctgtttaatcactatcatatgtgatttctatgcccatattctctatgagagtgcctcgttaattgtaaaagtagctaaactgctttttaaaaaaatactactgaagattccctgagctcactcaagtgtcttacagttatcacctttagtaattttctctagaaataccattttttgtctgtcaaagagcattctttcctatcaagggagataataatataaatacggttaaatttatatgtaaatttctacattaaagtcacactctgttattgaattttagaaaatgtcagtgaacctttggaaattgataattaggataatacagtatgccacagtgatgggcaaatacttcaggtcactttacatttgaatttatgaattatcagtattacttccatagttatatctgtatatttcatgagcatatgcatttacttctaaaatcacataaaaatatttattcacagctttttagagagatgtgtgtgtatacatgtatatatatatttaaacacagtattatatctttgccattctgcttctatgtctatagggagtcattttataattaaatatgttaaaacacttgttataaatccgttatttctgtattgatatgtttgatcttaattccaacttttaaaatttaaattggcttataagaaaatttaaatttgacagggtaacttaaattagaaggtttgcaaaaggagaaagagtaggagtatattgaaatctggaataaagtgaaaaatgagaaaaaacaattatattttttccccagccctgaaagatctctatattagcctaytcccttccatttagactctgtggatttgacattcttctaacatcttagacaaaggcaaaaatagcaatcctaactactcaccccatcatcccaggaacttacaacattgaatgtaagttgtgtgagaaactatgaggtcttgaaggaagccttgcaggctgcggcaataatgaccctcctgtcatgagcataccatgaatttggctctaagttttccagtttatacagttcccaagttcatgagaggaaaacaaactagatgttcagatgaagtgtaattattcttagaagagggaagacagaggaatttctcccgggagcctttataaagaggatgctatataatgaacagtgttttcaatattcttaaaatagattacttgacctattttatagataggttaacagtatcataacaaaattcaactcagagttttctattgcaacggcctgtttgaaatgtgttcaatatatctgtaagagttgattaactgtgtatacctaagcagttcttcacccttttttttctgacatggactttaataattaattaactgtcactgtgcttgacagtattcttctggctaatgacatgaagtgtatcaatagttttttggcaattgagtacaaatctgttaccttaaataggtggtagttagcatcttgttgttaatattgcatgagaaataggatgttctgttctattcttgggttagtcagtgtactatctactagtgggctcaggattctactcagaactgtcttgtacatgtataatcagatggtggggactatggaattctgcttcatacaacttcatagaattagcagtctgggagaaaaaagcagcagtaaacaggtgcatgctgaaaccataattacatctcatacagcatacataaaatgaccagttttgagtggtgttacaaagtagggtagtaatttgtaaagtgttcaccaaggtaactacaggaagcaacaattgtcaagagtcactttaatagcagaacgtctgatttgtggctyttaggtctagcaataattatccattaaggtctgttgtctgactatgcccctcttattttaagataattaaatcgtcaactgcctagaaaataaaatgtcttgcagttttctatttagatgacccatatttgaagtaagtgtttatattagctttttaaaaattgctgagcaattaatcccctcactgcagaagccttttcctaccaaagaaactaatattcctgtaactacacatgtacctcttgatttggtaacctttttcctttgtaatatgtaaaatgtataattaattcatcctacatctgagaaaaatatttcctacatgattatagtgttaaaacagtaattcagtaacatattctctgcttttaatcaaatatacatgattaacttttaattatattaaatgtagaattgactgtctccctctggcctgttctgtacttttaatcattttctcatttccctttaaaaaactagtccatcttctaatttagaacttttatcggtgaaagataaaaacggataggacagagggaatgaggtgaggagaggaagactgggatcaaaataaagtatgattaatttggatatttttgttcctgaacttacctgttatagtatattgattttttgaaatactaaatttaataaagtatgaatagttaattttattctcaaatctaaagaaatatattccactaacacaaaagcatcttagctttattttttaaattgtacaatccatgagaatgttgagggcctaaaattatcagagtttttacactaatgggatcattctttgaaaggcttttaaaaaatcatttcattcataaaaccttacttcattttctctcattcttttcagttttgtaatttgttgaaaacagattttcagatttgcaagcattgtgtgaaataaccagtattttacaattttagtgagaaagaaaacaatttataagaattatatagctaagatcatgattwgttgtttgtataaacttaacacgtcatctttcatcttattttctattttcttagtgttataaagacgaatcctcaagagaatgatatgttcttcaatgtcattgctattgttgatccattaacaagagaagcacagaaaatggcacagttgttggttgtaagataayataaattagactaaatgtttttgtttttaaattcataattttttcaagtctgttttcaaatataatcagctgtttatgctcttgatccttcaccattttaatagagtgtcatatttcaatgtagaaaatgaaatgatggagctgtgcacagggtgttgttatgactgtgctgaggttaggtgttgctgtgaactgcattgtattccccacaaaattcatatttcaacacatgaaataggtctcagtgaactttaagccctaactcccaatgtgactctctctggagatagggctttaaggggatcattaaggttaaatgaggttatatgggtgagaccctgatccaataggattggtggccttaaaagatgaacagagggagacttcacaaagaagaggttatttgagcacacagtgacatgttagccccgtgcaaactagaaagagagctctctccagaaaccaaatcagctggcatcttgatcttggaattcccagcctccagaactatgagaaaataaatttctattgtttaaaccactccatctgtggtgttttgttatattagcctgagaagactaatacaggtgtctttcatatgttgtgaagtgtggcttttggagaagctgaagcttaagcttaattggataaaacttaaagtgtaataaataataaataatgttagccaaacaagtgaagccgaggaaaggggaaacatggagtttgtattctataggtttggccgctataacaaaggccaaaataacactactttcaagactgaagtttctttctttcatctcctggtctaagtgtaggctgccttggggttgctaaggcagctacacagtgtgagggactcaggcactgcctgtgtcattgttgagctgtcacgaagcacctaagatcaccagtcaggccctaacatcatctctgcacttctgccaggaggaaggggagaataagagcacagccccaaagttagatgtatgctgtcctatcacttctcactgaccagaatgtccgcaggctggctacactgaatgacaagggaggctggaaactatgcccacaagtcctgcattaacctggaaattctttccctgtgaaagaggaaaatgaatgcgaagagacagatatcagtctccaaaaggacttatgtggcttaccattttacttagaatgtcaaacattcaaattagaatgcagccttcagtagttaaatttgaataagctagtcccattagaaggctgtatgttttkctactgatatcgaaaattttacaaactatttgtcctttggtagtcaacttcacttttgaaacaggcaaaagtaattagatattgagtctggtgaaaatgtaagtgatcaagccatatgattcgctgtatatcaaaatttcaaaatgcaattttttttagaatttagtgcgcactgccaaatctcattggaaaatgagattttattagtggagacaaataattttggaaagactttgtcattctagctgttcagtttatgaaacgagtaggacaaaccatagctgatttacctayttgttcttttagcattggttataccttcaaatttatatgtcttgagatacactattcagattattctttagaaagcaatcatatctgaaaggagtggagctagtatgatgctttttagtatgcaaaatccctattcctatgaagagtcattattcaaaaaacactacttaaatttgtaagttttttatataaaagtagaatttaggagtaagaaatacggaattagccaaagcaggaagatcacttgagaaattcaagaccagcctgggcaacatagcaagaccctgtctctaaaaaaataaaaaataaattagtcaaacatgatgctgcatacttctagtcatagttactactcaggaggctgaggtgggagaattggttgagcccaggaatttgaagttaacagtgacctatgatcacaccactgcagtctagccttggcaacagagcaggactatgtctcttaaaaaaaaaaaaggaattatacagagatataaaatatggaattgcattccagtttccatcattggtaataatagcatactttatttcttactttataaaaggataatttattggaagaaatggatagtttctcatctaacacttgagaaaaacagtggttcagtgacctccagagtagcagatatgatgagtgatagaataagaattgaaagtcaaatctcttaaatccttagtctttatgttctaatttctcatcaagcctgtatcctttctattacatatatctgtttcgttacttctccctttacctatatcatttgttatctaacagctttagaatcttcactgacatgttgcctatgtggagatggggactatcaaaattagtaattcttcctctacttcttactatccagggaaatgaaaagaaagtatttattcgtaggtagccaagaacttccaaatcccaaaagaatcaggacaccaccaacgttgttgtaaggtcaccactttgtatttgcagatcaaggttctagtaattattttccttgttcttcaatactaaggaaatttagatactatgaaaaaaagtcactttaggcaaagggcaagcagcataaccctgggacattgaaatcaactgtttggattaaaatcttgcctgtgctgtgagtttctgtgtgaccttaatctctctgtacctaaactgcaaaagtactatttcagcagggcgttgtaaggatcaagtgagataatgaacataaagttttaatatagtacctggtacatagtaaatacataataaatattagctattaatattatttaatatcaaacatgggaatttctttccaataggtacttggcaagattatcaacmtgaagataaagttgttcatgaactgtaggggcaggctttcagaagcccctttagaaaggtgagtctgagtgaacaaaatttcattttgaaaaatttgtaaatgctgagaagaaaaaaacaatcattgttactggacctggttttttcttttcttcacaagatgcttcaaagaaataagtcagaargtcagactatttactaaccttaactgacttaaaattgatrtmaaaattaaaataacctaactcagcaaagtgatctgacctaattacagaatttacatggatttatatttattcataggtatttttggaaatgtgatttaggaatacctatttagatatacatcaatgggaaataaggtggaattaaaccatttttggtttagcagaattaccaaaatgatctttattatatcatcacatttactatttgggggcattaggataaaattagcttagaataacctgccagagatataaaaaagtgttgtttataattatatacaaatattcctcattaacactcttctgttgaaataacattctctctcaagaggggacaaaaatataccctttctcttctttgtggatcagaatcactgtcattcattatgagccattcttattgatgggaatattcagttctccttcatgtgtcattgggcagaaaacagggtatgtaccattgcactagtatagctttttaagactttttaatgtgctcatctctgtattatttaatgatgtaattctaaacaaaaaatgtatgcatacacacacaagacaggtagcattctgttcattccttgtttacttttcaaattgtatttgttacaactgacatactatagatgttgccttgagcrgaacttttttttatttttatttttattttttttggagacaggttctcactcccattgtccaggctggggcaccatcacagttcactgtagcctcgacttctcaggctcaggtgattttcccacctcagcctcctgagtaactgggactacaggtacgtgccaccacgcacagtttttttgttttgttttgttttgtatttttgtagagacggggtcttgccatgttctccaggctggttttgaactcctggcctcaagagatacacctgccttgctctctcaaagtgctgggattataggcatgagccactgtgcccagccagagcaggcattttaaacctaagtatttttaatagttggaaagcaataaaatggaaaatgtgggaaatttaagtgaaagtttaggacttattcattgtccctcaagactcttgtccatatatctcattgagtttttatgcttctcatttatcttttgtattttaaattttatcacatgcctttttacatctgaacaaaaactttaaattttttagctactaattgaaaggtttgttagttccataagtacagaatttttattcacaggagtaggggtcctctctgtaaaacatcacattatgtaataaagaataggattactgaacatataagcaagcataatctactgggagggaaagaattgacttttctaaatgaaataatgtactagagtatacagttatttttttaactagtagttcaacagaatcttattaactcagtagcatatatcaagcaacctagcatacacatttattcccagccctttccttttagtaaatttattcttctcagagatgagacaggttaagggcaggaatcccctcagcttcttactcttaactgctatacttcctcagccttcctgtrttgtagggaaggaatgaggcatctttcttcttttttagttaaacattcccactctgttttgatctcatgctttcctgtttgttctggatccttgctatatcacatattctctcttgtggatctttaatctctatactagcttttttcattcagtccttaaagttattcaatttttttaaaagttgctcccttaactttctctcctctagagtcttttttttccctcttcttcattccttcttaactaaatttcttcaaagaatggtcagactctgtcttcatatctcattcactgtaccttccactgcagtttctctttaactttctctttgccactgaaattgtatttaccaaatcacaaagaaattgctactcactacattcagagaatactttttctttgatatttccactgcagcaagaatttgttttgaacatttacttcatgactgtattctctcctgtttctcctctttttattttctttgtctatctgcataacatggctcccagtgatcaccactgcctgggactcacactctgaaagttctcctggagtgagagctagacctagtgatttggctctcataaaacaaaatatggctaaagtgatggaatttcccttctgcaattaggttatgaaagactgtgacttttgtcttgctgacattctctctctgtggctcttctgtgtgcttctcttttgaagcatattggagatgcctttttgggaagtaactgcaagcagtctgcagacaactaccagcaaggaactgcggtcctcattcagacagcccttggggaactagaagaacctggaagtagatcctacccttgttgagccttgagagaactacagcacagctgacaccttgactgcagtctcaaaatagtaaaagccactagccttgatagcataacataataattctgtgcacaatattgaaggatgaggttaaaatacagcaaaactgaagttaagtctaaaagtgctattaagcagttgctttcaacttaatcctatttgtttttagttgagcttttaaaagtggtactagaatttcagcttgaatttcatttgtttcctaccatttctcttcatattattagtggtggtaaaagttaataaaatagctgaaaaatagaccayggtcagatttgaaggaggatgcatacaaatcataatacaataacagatcataaactcctagaacctgcataagtcaggtatatcttaaagggattctaatcatgttcattaaggaatagttaacaatggtagataatatacatagacttagatagtagtgtcaacaaataatgattgtctrtttctcataagcattaacttttctgcagtataatgcatcttagtctttttgattgtagacttctggtcagatcattaagcaattttcaattttgaaaatattttaaaagaaaaatctcagttttggtcacattatgtatttttatgttttattaacagcttttaccgttttgttctggaaccagaactgatgtcaggggctaatgacgtttcttctcttggaccagtggcaaaatttttggatattcctgaatcacccctcctaatcctcaacatgattactccagaaggctggttggttgaaacagtgcacagcaactgtgaccttgataatattcacttaaaggatgtaagttattgtgtatagtcatataaagagagagaaacaggataaattcttatcagctattacaattgtagcaagtgagcaatcatactatgaatgtttaccagaatattcttttttatgattctaggtcctgatccaatctttcctttgatttttaagtttttctaatttccaaactcagcttctctagtcttccaagttcctaggtgtctttacattttttctttctttctttttgcctgagactactagcttgcaaagacatttctctaagatgagcagtgtcaaaaatatagagaggaacacctggcaacttagtacaacaccattaagtacttattttgctcttcaagtttagtttttaactcagcaaatttcacccaaaattgttttgttgttgttggtttttttttttttttttttttggcctcacagctcatagccagagaaagtagtcctaactaaattagggtagaaagtaggaaacaaaatttgcggtatactacaggccaggtatacctgcttctcatcacccccggtatgacccttgtctagtgagtagtcagacttctcttcctcagctgttgtaattcacagcacagaaagaaagtattaaactgagtcttttaaacgttgaatctagaatgagaaaaggaattcagaaaccacaaaaaagggaagcgttttggaagaatttaagatacgtgtggtagtctgttttcacactgctataaagaactgtctgagactggctaatttaaatggaaaagaggcttaattaactcacagtttcgcatggctagggaggcctccagaagcaatcatggcatcacggtggaaggggaagccaggcacatctcacatgacagcaggagtgtgaggggagtgccacacactttaacaccatcagacctcatgagtattcactaccatgagaacagcaagggggaaatctgcccccatgatccaatcacctcccaccaggcccctcccctgacgtggggattacaattagacatgagatttgggtgggtacacagagccaaaccatatcacttggtatccagaaaatgaggaaaaaatacttccttctccttattgtccttacttccttctccttattgtcctccctctgacctatttccagctctttgtgtctgatacctcctgtagaatatagccattgccttgactgaagcataaacatttacctgtaataatttggttaagattgtttataatgtttatttctcatgcttcttatgcattatcttttgcmtaaagattttccttctaggaaagtttattttgatcggctcgtatgtggattctgtgggatcctaaatcacttttctgtaacatactccccatcactcccaactggacccacctcaaaaaagaacctaaaactcagtcataaccatcttctaatatcagtccttcaaatttagagaaaaggcagcaaactaatagcattaatgagaaaaacttaacaaatgaatcttataagaagtgaaaaaaaaaatcgctgttttttccatgatcagtcagatctcttaatagagtctggaattcttcatgaagagagtgcggcaatatactcaataaggtaacttttaaacatgctatccaaaactgtgaagtgtttgtagtgggagaaattagtacagcttaagaaagattttaaattgaatctgctggtgaaaatttcagcagctattcaacagctgatggagattaactaaaacttttttttgtagtgagtgtcaaatctaatagcgtctttttagaagttgttcggatgaacactagctctaactctgaagttagaagactaggatgaaggaaaatttcctgtgtcttcatagtttaggtgaataaacaaaaggagattataaattctagcatctgtaaaagttaactacccctcaggctcatctttttcattgtgtgctatacaaacttaaaatattctgcaaccatcctggaaaaataacaaaggcatttggtatagtagaaaggatttttagataaaggggaaaagtacatacactctggcaaaaatgagataacaatgagagatttaccaccatatactaacttgtrcaaatattcctggttacacctaattcccaaacactgtacaaacacctggaagaaacttgatctgggaaaattctcccttggcaggactttgttcacatgattgtcactacattgacattattgcacaaccagcattaatttcataattaaaggtgacaaaaatgattaagaaagctaggccgggcatggtggctcacgcctgtaatcccagcactttggcaggccaacgtgggtggatcatgaggtcaggagtttgaggccagcctgaccaacatggtgaaacctccatctctactaaaaatagaaaaattagccgggcatggtgacacgtgcctgtaataccagctactcaggaggctgaggcaggagaattgcttgaatccgggaggtagaggttgcagtgagccaagactgtgccatggcactccatcctgggtgacggagcgagattctgtctaaaaaaaaaaaaaagctaaaagtgagacagttacttttacctggagttcagatgtgttgctcttctcagtgcttattgttagaactgcatcaaaagactctctaattatatttcatcacagcatatatatgaaagatgtcaaaatacctggaataacaatggtggttacaccattttcacactgttccaggtattgccataaaaggcaagagaagatgcaataaataaaagattgctaacaggaataggatgtggctctgttaaagtgaattcacagaaaaatgcattaatccctctgaaacataaataattttgatatcagttttatttattgatatattcattacaaatataattgtgaaagaattygtttgattgccagaggtatgctatagatcctaaataatactrtattatgaattagatgaacactgttcatcttaggctcagtttattctctcagtgcataatatatgaaatttatgtctcaaaccatcaaacacttacaaaatttgggaaaaggtcacatttgcagcgaagagttctgtctcttctgcaaaacttagaaatttaaacaaaaccttaacaaacttgaaaatttatatatcagaagacttgtactttagaagtctcccttaatccacaagggatttgttctaagatacccccacccactcagtggatacctgaaaccatacatagtacctaaccttttatacattgttttgttttgttttgacatggagtcttgctctgttgcccagactggagtgcagtggcgtgatctcggctcattgccagctctggctcactgcaagctcagcctcccgggttcatgccattctcctgtcccagccccccgagtagctaggactgcaggcgcccgctgccacgcccggctgattctttgtatttttagtagagacggggtttcaccgtcttagccaggatggtcttgatctcctgaccttgtgatccacccacctcggcctcccaaagtgctgggattacaggcgtgagccactgcactcggccatgttttgtttttttatatacatacctacctatgataagagttaattcataaattaattaagcacagtagagattaaccttagtaactaataataaatagaacaattataaaagtaggtcatcatcttctactcttgtgctttggggtcactaagtgacataagggttccttgaacacaagcactgtcatgcgagattttattacaatactcagaacagtgcacagtttaaaacttatgaattgtttatttctggaattttccacttatttttggaccatggttgactgaggataacaaactgtacaaagagaaaccacagataaaggaagactacactaccttatgtgcctcaaaccaccaaattatctaaaactaattcctttaactttttcttggatttttgcccagagtcctgaatagtttcttaaagttcagattgcactaaagtctttaagttcagccttcacctgccttgagataagatgcaagaaaaagatgtactatcatttatccatctccactatcagatagcttgtcagagtttagattacagatcaagatatgtgttatagctttgctattaataacttgggaaaatgtgtctgcagttacacaaaatcacattcaatagcaacaaaaatactagattaacatatttacagacaattgttaacaaacccaaatgttgatctttataattaaacttagccttttcttaaaggaagacacttagctattcagccacagaagaacagtacaattaatatcctattagaaaaattaatatgttccatggacacagggaaaggaacatcacacacccggggcctgtcacggggccagagggctaggggaagggatagcattaggagaaatacctaatgtagatggcaggttgatgggtacagcaaaccaccacggcatgtgtgtacctatgtaacaaacctgctcattctgcacatgtaccccagaatttaaagtataataaaaaaaaattaatacattctcaaggttatatttgaaaggtattaaatttatgtctggtatcaacaattaatatttaaaacagaaaataaaaatataaagggaagatggaaacataagcatcaaaaaagatcactaactttcatatttttgctaaaaatgagctttgtggccaggcacagtggctcacacctataatctaagcactttgggaggccaagatgggcggatcacttgaagtcaggagtttgaggccagcctggcccacatggtgaaaccccgtctctactaaaagtacaaaaaattagctcagagtggtggcctatgcctgtaatcctagctactcgggagactgaggtgggagaatcgcttaagcccgggaggcggatgttgcagtgagccgagatcgtgccactgtactccagcctgggcaacagagtgagaccctgtctcaaacaaacaaacaaataaataaataaatgagctttgaaaataggaactaatttaacttaaatcacctctatgaaaacttaaaatattcactagaaagaactctttggaaaaggaattggctatgtttgtatgttgtggtttgaataagtcaacagaattgaagtctgttatataaatatataggaacaagagaaattttcacattaatataaattaagaagatactgttattcacaaactgggtaagtgtatttagactcttccctagtatctaattcataataaaataattaagctttactttacagtcactttggtgtattgcttccttgtctgtaaagtgagggtgttgaactacatgatctctacaatctttttctaatttttaacattctcatattattctgagactatcccatgaaaatctttccagtcaagtaaattgctataaagactctggatataggttaataaattatataaagtttatcgctagaatagtaattcaacaactaattcagaattcaactaaagttttttaaataaatactgtcttcaaagaagttacttattttttgttcttaaaaccagtaaaataacaagaatcaagaaagaaatgctgtaaacaaatgttgtaattatttctgagataattgcagtcaaggaaaacaactatacaatacagaatgtatccaaatagtctatatcctaaacacactaaacaatagtgttgaaaacctaatatggtgaaataagattagatataggtaacattgctgtctttaatctcaacagaattctgtctgtgaaaatcactgtttgatttattttcatgtttagttatgctgttcatatgaagtagagaaaaagctttatcttgaaaatatttattataacatttgcaatagagaaaaatccagaaacaactggaatgtccagccatttaaaatgatatttatagagacagagacatgttcttagaaaaccatgtttaatgaaaaggcaggttactttcttacaaaaaaaatttatgaagacaagaaatagaaatcagtgtgttgatgtttatatcagtgtttattctgttgaggtgcgttctgttttttcttctttccactttggaagtggaaaacgaatttttattttttaaaattaactttaaaaatatatygatcaatttataattagttgattatagacattaatttttttaattacaagaaagccaatagatagtaagttagctttcttgccaagtctgaagtgggagcttcaggacaacagcaaactgaagcagattctttaaggaatttcccatctaaatctcatgttcacgtctttcctgcttggttatattggtgcatataccatgaggttcaggtaaagctgatgtcatgaaaaagaaaaagtttatcataagctttttgtcttgaagaaatcagttcaactcatgaattcactcatgtgtaaaataaagacttaaagttagccaccaaaatacattggccaatattaaaataatcacatttatttatttcaaaattttgtattatgagttttacataacaccaaaaacaatgacatacttcctccacagactgagaaaactgttacagcagaatatgaactagaatacttactactggaaggacaatgctttgataaagtgacagaacagcctcctcggggtctgcagttcacactaggcacaaaaaataaacctgctgtggttgatacaatagtgatggcacatcatrtaagtattatttaattgatggtgtttaatttgatgttttggtgaattctctgttttcctaagagtaaaatgaaataatctttattctgctgttgctgaacagtttgcagaaaacaaaattgaatctttgaataagataaataaaaaatggggaaaatcatactttaataatttttgacaggttattgtaaaatctctttacttggaattgatttatagaatttattcattctacagttaataaatactttcttagatcattcgtgtattcatgagcaattcgatggtttttagtcatattactcaatgattatttttttctcatcttaaaaggggtattttcaattaaaagcaaacccaggtgcttggatactgaggttacaccaaggaaaatctgaagatatttatcaaatagttgggtgagttatgcaggctgcttttaaatttttacacataaatacgtttttagtgtaatacaaccaagagaatcaaaacaacaattaaaatgttaagattggcctggcgcagtggctcaagcctgtaatcccaacactttggtaggccgaggcaggcagatcacaaggccaggagttcaagacctgcctggccaacatggcaaaaccccatctgtactaaaaatacaaaaatttgccagacatggtggcgcacacctgtaacttcagctattcaggagactgaggcccaagaattgcttgaatcttcgggaggcggaggttgcagtgagcagactgcaccactgcactccagcccaggacagagagcaagactctgtctcaaaaaaaaaaaaaaaaaaaaaaaaaaagatgactgagttaggtctgaacatcagcaagagggcaaaacaggacattccggtgctcatacccatgcagaaacatcaatttgaacaactatccactccacacatgaaactaccttaataaaaactaaggaacgaggtaagctgttacagcactgcagtgtagcacagaaataagaaagacacattgaagagtgtaggataatttacattacatgcattactccttcctcaacctgatacagcacagctggagagatacccccttgggggaagkagagggaagtgagcagcagactttgccttggaccccaaaaccatgctcaccccagtaaaacccaaagccaggtaggcctcacagccccaacttaatgctggtaccagaagactgagctgccagatsctgtagccccaagctccaaatctgcctggtagattcagtttccaagcctgtccaaccaccaggcctaccccaccaccaggcctaccccagaagccccaggctattgcccagcctcaatgccaggccagcccccacaaattcaggctcttagacttttccctgtaccagcataattgatattttgatcatttaatgacaatatggtatacattatatcttatataacaacaccgttatccctgggttatattcaatttggaattgtttttttgcacaaaaattttcctgttcttcagtgagccatagtagaaagcaggagttatcacacttttttggtaaggagccaaaagtaagtatttaatgttcatttgagagcacatgtggtctttgtcaaaattatttttttaacaattattttaaagtgtaaaaatcatttttagcttagggctattaaaaaaatagaccataaacctgatttggtttactggccatagtttgccaactcttgataaagtcttttttatacccttaataaatatctctagatttcattgctttcaataaatacttactgagcaccttttattataccacaygttgtgctcaacaaagataatataggagtaggggttactgtatctttttttcaccactctttcccctttatactgtgcctagctcatagtgtcagttaatagatgtgcttgatggcttatgcacacagagccagggatgcttagttctgtggtagaggtgggtaggaggaagtcagcattgacattagagatgatatagtacctcaagaaaattgaagaattaataggaagttattagtcataycacagacggaacattccaggaagagggtagacatgcacatctcccatctaaaactcttagggccatatgtgttttagaatttagaagtttttcgtttggaaagttaatacagtacacatatcatatattatgacgtatatcccagcaggatctgagaaagccctttattaaacatcatttgtattgcagaatgcgttaatattcacactaaaagggtttatgtaaatgactgaaaaagagaatgaaaagacaatccacagactgggagaaaatctttgcaaagcatatatctgacaaagaatttatatacagaatatataaagactatcagaactcaatattagaacaaataaccagattaagaaaatgtgcaaaagacttgaacagacactctaccaaagaagatatatggataagtacagaatgtatttaacattgttagtcattaagaaaatctacattaaaaccacgagatatgccacatatctattaaaatgactaactttataaaaagaatgacgatatcaagtgttggtgaggatatggagtaacaggagctgtttttcacttccattgggtatctagaatggtacaaccacttttgaacaattggacagttcctagaaacgttaaatttacacttaggctaggcatggtagttcacacatgtaatcctagcactttgggaggccaaggtgggaggactgcttgagcccaggagtttgagaccagcctgggcaatatagcaagacctacctctatgtaaaatcaaaaaagtaggcaggcacagtagctcacrcctgtagtcctagttacttgggaggctgaggtgggaggatcagttgaccccacgaggtggcaactgcagtgagccatggtcatgccactgcactccaggctgggcaacagagtgagaccctgtctcaaaataagaaggaggaggagaaggaaggggatggggaggaaggggagaaaaggggagaagaagaatttgctttctgtggtttcagtcgcccatggttaaccacagtccaaaaatattaagtgggaaattccagaaataaacaaatcctacattttaaattatgcactgctgagtagtgtgatgacctctcacaccatcctgctctgttccacctggaaaatcattcctttgtcaggtgtctgcccatgagtcacttagtagcattctcagttatgagatcaactgtcatgggatcacagtgcttatattcaggtaaccctcgttttacttaataatgaccacaaaaggcaagagtattgtgcctaactttaaattaaaccttatcatagacatgtatgtataggaaaaacatacatttagggttcggtactatccatggtttcatacatccactggatgtcttcgaacctataccctgtggataagtgggggttgctgtactactgcatgtctccttttataagttacaaaacactagataatacaagctatagtgacagaaatcacttggtgaggtggaataagcagacaaaaataaggacaagtattggagataagcggttgaacaatgctgttttgagaacccccagccaaattgagttccagtactggagtggctagtgaccttgccctaatgaagaatgaaaggcagctggatgtgaatgtttactgtgtgcctttcatgggatacttcgtttacctggtggatggtctaattcatagttgtctgaccccagacccagtttccctcacacaggaracttgtttatgctgacagatgtccgtgtggctcttgtctgacccatgtccagtttatgtttgcctgatcatcgcggtgacactgggaacccaacattgtgttctccccagcatcctcgagaaaacctggtctgggatagtccctggctcttccaatggggggtgcaaatttaatacaccaccacaaaaagaaataagttcaaagatttatcacttacagatcctggmcaggaagggctccatctctaggtcacatcaggcaagaatgaagaggagtcaggcagagagaaagagagagcatgcatgcaactagcagtatatataagggaatagagcatgggtcacttttggtctgtttgaagggaaggcaggacaacagaagcccagtttgctaggcaggaagggtacctctaagttcttatctttggctaccagctggacccatttgggtatgttctaatgcctatgcagcaacctatgctaccttgstgtgtcattcccattacaaatagacagttcctaccctcccaaaactcattccagtagaaaagatagtcaagaaaatgagtgactattatatgttctaagtgctataaaagagtgctatggtagtgtagaaaatgagcaaaataggctgtaacatttatattgacccttataaaagccatggtttcaagatataattttaagaagcattcatgctttgtttcagctttttaaattttgtgcaaactgctttgccaggaattcagcatttctatatctgccactaccgtttcatcattatgttttgcaragggaaagccctgtatatgaattgtgagkcaaatcccttctgtaccaccaactatccgtatgatcttgtataagtttctttgctatttgtagtctttatttcctcattacaaaagggaataatcctacctcccttgtggggttttgctaaggactaaatgggaaaatcattgtagaatattgagtaaatgcccatttcctctccacttatcccttcttttacaaatacagttatacaatagcacatgtattatgtaaaactaaaactatacatgatttagattctattttatcttctttactattattttctatcatacacagttcataaagatgttcttgatgttatatttgaagtaccactaacatattagtgaaaattgttttttctcattcacagacaacttttggcagtagaaataacttacaaacttgtttgtattacttataaacaataaaaccatatacttagtcataatttaattctacatatgattaatgtcactagctatccaaaatgcaaaaaaratacatgttactgtgtaataaaaagtctaacgaggtcaatataaaatataacaaaaactgatattgtttatcctaatttatgttttaattgtaattgatattacctttataattaggaaaaatattcctgaaacctgctaaaaatctaagctaaaataatattgatatgagtttctaagttcagattttaaagccatggctaaattatttgattttttaaaatttggctttccacttctgaggcataatgcccacaatgtgtactttctgtgtctgtcaatctttttgtagtcattaactgcagattatttgtgtgtactcagtattggctgttacttaccttgaatacaaaaagtctcaaaattattctcctttatttctttgtagttctaccaaaattagacaaatgctgctcagattttcctaattaattgtagagaatattagatactttatttatgcacctttaatgccaaattattgtgctagacttctcatttgaaatctttagaaaaatcttttctgccaaagtaacacttgtaatcaattttagtttggtacctttgagactgaactgtttctcccatgttttttrtaggaggaaggacagagatgtcaaacaaggctttccattctttctccgcaggtactcgagttggtccaccgtaactttgctggctctgcagtagttaaaactcactctctgcggactcttaaaagttctctattgctgtacttcactctcctttagttccctggttatgttggtgtggtctcctcatacctcctggttgccatattggcaggacacatgactacccagtggtaacaacaaaaccaaatcgctctccttcttggctgcatctgatctgtggaaatacctagacatcagttgcccaacaaactctagttcagagcagttgcagaggcagtaagcactctcctgactcctcgattagagcaacaaaacagtcctcaaatacccaatcctgctccatgtacacttctaactttcccagacatgagtcctctgtgcatcccaacttcagaatatgtgttgcaaagtgtcttctccttaaagtgtctaccttactgagtttagaatgagaaggcaatactcttccccttccgtcctcacagggtgtagtggtggagactcacaatctgacaacagctctctgtaaggaaactcttctgccttcatctcacacaatcccttttctgaacatttttatatgctttatctctctgaggggcaatctgcatattgtgagggtattgagaatggatgactatgcatactcacttcggtgtctggtagctatctcattggtgtttcagtggaagcattctagcatccttttacccctacccccaatattctgtttagttctttactttcatattaccattagttaaatataaattttaatgaattcactattgatcacagtttttatatgtcttttaattttcacattcattttttgtttagatggtgtcttaggccattttttgctgctgtaacagaatacctgtgactgagcaaatttattggttcatagttctggaaggttggaaagattgagggacagcatctggcagaagccttcttgctgcattgccctatggcagaaggcagaaggacaagagagagcaagagagggccaaacttgcccttttgtggtagcaccacttccactcaatgagggtggagcctcatcacctataatcacctattaagggtcccacctcttaatactgccacaatggcaatacaatttcaacatgagttttggaggggagggacattcaaatcgtagcagatggctgacttcccatattatcatagaagtatttaacacaagcaattggatgcttttacatcgtattgggaaggactggcggagcaagctctccaggagggctggatcctaggaatgcttgagaacaaagccaaggaactgaccaaccagaaagagctgctactttcccgtcatcagaagtgagagaaagctagaagctgctgccagcaacacatcaactggcctttggtacccagaaagctaagcagttacacactggaacactgaagtagaaaacctcaatgtctccatgacggtgcttgacaaaagaagctaggcaggcatcagcacattgccccgctcacttctaagttccaaataacatgcaaatgtatctatctgtttagcagaatctaattatcaaccaaaaccttagctgcaaaagagttgagtaacaacaacaacaaaaatgggtgtatctttctaactactgcagtgtatgctaaaggtgggatgttgcctgccatatcataatatacaccaccttaccacaaataagttttttcagagacattagtggtgtaccctcaaatgtttaaaactttgaggtggtcctcaaaggtttaaaaatttcttttgcagttccgtatgaattataactttcctaagtattgaataacagcattataattttattcagaatgcttgaaacaaggcttcatcattgtttcttaccagttagtgttttggatgaaaaatatgaagccaatctgatttacatttcttctctgaaaatataaattgttttttagaatttcaggagacacatgtataagtgctttttttaattaatcatgctttctgacacacagtgaattctttcattttgaagtaaatggcatttactgagattcagtattctcttgaatctcattgagaatatgaattatttgaatgcttcccttttttctgcattaatgccttatcaatgaagtccatttcctctgactgcttagcttgttcccttcatttaagctgcacattttcctcatgtatccagaggtttcaggtgcttagcattgttggtaaaggtctgatagtacagtggtgaagagccagactatctagactcaatttggatctaggataataattgtactttcctcaaaggatggttgtatggattaagtgagtgagcatctatgaagtgcttaaaacagtgcctgaggatgtggagaaataggaacacttttacactgttggtgggactgtaaactagttcaaccattgtggaagtcagtgtggtgattcctgagggatctagaactagaaataccgtttgacccagtcatcccattactgggtatatacccaaaggattataagacatgctgctataaagacacatgcacacgtatgtttattgcggcactattcacaatagcgaagacttggaaccaacccaaatgtccaacaatgatagactggattaagaaaatgtggcacatatacaccatggaatactatgcagccataaaaaatgatgagttcatgtcctttgtagggacatggatgaagctggaaaccatcattctcagcaaactatcgcaaggacaaaaaaaccaaacaccgccatgttctcactcataggtggaaattgaacaatgagaacacatggacacaggaaggggaacatcacacactggggcctgttgtggggtgaggggaggggggagggatagcattaggagatatacctaatgttaaatgaagagttaatgggtgcagcacaccaacatggcacatgtatacatatgtaacaaacctgcacattgtgcacatgtaccctaaaacttaaagtataataaataaaaaaaaaacagtgcctgaagtaaaatgagagctcgtcaccattactacctctgctacctgatggaagtggaaagagatttgctttagaatttgtctaggtctagctgtagtgctctgctagctggcttttatactctgggtctcagtggacagggaattaaatggctaaagttgtcaatgcccttaagtagtgttttgtgactataagcagctgaaagtttttaagaaatttgacaatgtttctacyatacaggttagatcctttttgttttgttttgttttgttttgttttgtgacagggtctctcttrcccagacggaagtgcaatagcacaatcacggctcacaggtcactggagcctcaatctgccagtttcaagcaatcgtcctacttcagcctcctgactagctgggaccacagcgctggccaccacatccagctaatttaaaaaaaaattttttgcagagacgaggtctcactgttgcccaggctggtctcaaactcctagactcaagcgattctcccaccccagcctcccaaagtgctggggtcacaggtgtaagccatcacacctggcttctttctgttttctagtggtgattgttggacagagttctgcctgctacattggtttaaccacctcagctcaggaattgggagtaagagaaagtcaaagacgtgtcagtcatgatagtgctagactccccaggtgttcattttggaaaaatgttaaaagtatgtattatatataacaactcaaaagtaactatactaatttgacatctgattgcttccccttcaacaaaattcaactttattgtaaatatgatagaactttttagtccatagtgagaatagtttgaaaaaataattayggagcacagttgccatatttgtttaagcaattttgaaaatgggagaaaaaaactgcattatacataatacaaaatggaaacattcaggtgatgcagatggacatcatagacacattttcagtctcattattttaacaatgtacttcaaattttggcatttgaaaatggctggtggatattaaaaagttggatagtgtagaactcctttgaaatataaacaactttgaagtgtaaaaaattgtaattatcactacaatatatcagggatgtgaaagattttagttgtgtgatagccttggtatataacagcaaagataagccataatttgaactttcagagtgattgggtagtattgaatttaatgagttacttttgtacaattttaatgtgtactgagttaaaatttattggataattttgaaaattacagcatattatagtatatcttaattgactatagaaacagaaaaacatgatatatgcactagtgttattggacttacgtttattgcaaaatgagtttattctgttatgccatcataattgtatgtctattcttaaattaattatggacacatttttctacttttaggcatgaaggaactgactctcaagcagacctagaagatatcattgttgtattaaacagcttcaaaagcaagatactcaaagtaaaagtatgtgggggcagaactttttataggctttgttcttaatattaagaattatcttctttgttttttaattaattgatttattttacaattaactttacaattttacaacctaaaatgttatatttgaactccagcagtaaaaaaagaagaggattaagttcacaaaggaaaacagaacttgaagatagaagagaaggatttttttttacattatgataactgtaaatatatctactaaatctatctgtagccaaataacattacaaattggactctagagatgagatcaagaacatgcactgaaaaattagctctaaaaagagaaggtgctgttttttaaattgggagagaaagggagtttttaatgatagcagattctttttggaccaaccctcctgcttaaaactagtgaaaatattagataaaaatttaaaaaaattttaaaagcaatgaggaacggagaataataagataataaggataataaggaaacccaaaaccaaaattaaagggaaaatgcgagcctagtgaaataagcaagcacagaaacttctcttgacccaaggaagctactattgtcctgggaacatttttctgtcctgtcacacttttaactgccatttttatttaatttgatgggttaggggacaaaaattagaacccaggacccacataaaataatctattagaagaccctctacaataaactagctctattttcaggctaaggatgaaacataaaaaattattcctcatagtcttttagcccaaatttgtgtcagccaagtaggccagggaatcctgaaccttgaattggtactaatattcttccagatggataggatatagcggtatctggaagagacatccataaatctctggaataagattacaatagcctaagctgcaaatcaaatttttctagtatgaaggccaactcatagtcaaagttaaccaaatacacaaaaccagcagaaacagaaaactgatacacaaagacccaagatattaaaattattagaatagcctctgaaatagctgtactttttttaaagaaattaaagatgagtttaaaaataattgctgggaacatgaaactgtaaaacatgcatatcagatttttttaaagtagaactttggaaactgagtaatacaataccaaaattaatagtagatagctttaacatgccttcagagaaaattagcaagttgggggagataggccagaaaaagtataccaaatgcaatagagacaggaaaaaaagaaaatatagaagagagcattaacacacacacacacacacacgctagtgtgaaagtctaagattaccagcagtggatttaaaactggctttgccactcactagctgtgtgaccttggacggattacttaatctctttctgtctcatttcctcatctgtaaaatggggttaacaatagaatataccttacaggactgttatgaagataagataaagcactttatgagtatttgttggataaataaaagtaaactaaatggaatttcaaagataattaaagaatggggtacaagtaacatttgaagcaataatggctaagaatttttatgaattatgaaagaaaccaattagaaatattctacagcctacccataccctaggtatttcagtagtttgtttttgtttttgttttgagaygtagtctcgctctgttgctcactctggagttcagtggcccgatcttggctcactgcagcctccgtctcctaaggtcaagtgatctctctgcctcagccccctgagtaactgggaccacaggcatgtgctaccatgcctggctaatttttatgtttgtgtgtattttttgtatttttagtagaggtggggtttcactgtgttggtcaggctggtcttaaattcttgacctcaagtgatccacccgccttggcctcscagagtgctgggattacaggcatgagccaccatgctcggccgccttcagtttgttttctaataacacagttttatctcctaaccacctctttctcagaattacagkaaaaagatagaaaaacagggaggagaaaagataagcaacatagaggatcagcccatgaaatccaatagcctattaagaggaattccagaaacaacagagaagatggaggagggaaagtgttgtaaagctgagagagaaaaatgttcatgtcaaaagagtccacaaattacgaagtagratgaatgaaaatggcccatataagattataatagctactaagaaggaaaagtgggtcactgcaatagaatgacaacactaacatcagaatttcattttcaaaatacttagatgttaaaagacagcaaaacaaagctttcagtattttgaggaaaattattttgaacccaagattctgtatctagccaaattcttaatcaaatgtgaaggtaaaatgttagtttctgaagtgtgaagatttagaaaaattatttttcataccctttcttggagatgtttgccagtacaatgaagatcaagatcaagaaagaagataggtagttcaagaaatggtgaaactaatctgtaaaccaatgtaaagaaaatctagaaagaaacagttaattgttgaactttaagaaaaatgtcttcaggtagacaagaatcctagacaattagataacatgagtaataaactggaaaagattatgtctgtgataaagaagacatatttgtatatctccccacaagaaaaaagaaggacaatggaattccaggaaaaaatagttctctgctggtggaatgtaagaaaggagaattcatctaacccagcaagagtctcctaggagtggcacagtggccataggaggaaactataactatgctgtactatgctaaaactataactgtacagaggaaatagagttttagtagcttttccgactcttcagtggttaatctttacattgtcataatgaaaactttttactgattttcaagttttagaatcaccatagcaaaatgcaacaattatgtctactgaactaaatgtaaatgttatcaatatttacaaatgctaaagtcaaggtttaatataagttgggaggtagaaggaaatcatagaaatagtagtgtccttataaacagattatacaagagaaactgttgggattgtgggaataaaaaaataagagatttaaatattatttaaagtgacaaaaaatactcaatagaagaaccgaagataaacacattactaccaaaatttccagacaaatagggaaagggaagggataacgataagtgagctattcatctgtcatcacaaagagtgtataatgtctaaactctgaattcagaaatactagtagataatgcctaaagctgataaattagtaaacacaagggtaagcacattatttagcaatatggaggtaaccactgaagaaactgaacaaagaggttgaattgatagttaaagaccagattgtttacaacattgtgctaagatattgcctgtctttggttactgcaactgtcaatcttagatttctatgggtaatctcgcccaatatgtttcactttctaaccatacagcacaatatttaaagcagccaaattctaatcttttttgccatgctatctaggtgaaaaaagaaacagacaaaattaaggaagatatccttaccgatgaagatgaaaaaacaaaaggactgtgggattccattaaaaggtaattactaatgaatattttaatacatcactagattgatccagaagtctagtatgtggaagttccacaggtagtgaaaatttaagtaaggcaaaggtcctctaatctaggagggataagataaatacataartgttactactgtgtacaagataggaaactagagctataagacagatgaaaataaaatactatacaaaccaatggagaaaaattatatatccacttacaaggaaccttgggaaatactccttgaagaagtgtgtggcaaagatctgttttaaaggacagacaggatttcaaaagttaaagattgagtgaaggcaattacatgaagacaaaatgattgggtatgttcctcaaagaaaagaaagtagcctagctagctgcaacttgaaaataaaagggactgtttatgttagattgatacctatactgttttattgttagtttaaaaaggaacacaggccaggcatggtggctcacacctgtaatcctagcactttgagaggtgatggcaggaggattgcttgagcccaggagttcaaaactagcctgggcaacatagtgagaccctgtatctacaaaaaatttaaaaattagcctgttgtgatggcatgtatctgtagttccagttactcagaagactgaggtgggaggattgcttgagtctgggaggtcaaagctgcagtaagtcaagattgcaacgctgcactccagcctgggtgacagagtgagaccctgtctcgaaaaagaaacatacataaggaatatattgtctcagatatctaaagaatccaggagtacacctggtgttggccactgggtgatgtggtgtggaaacaatctttctccatctcttaggtctactgttttctgtgtctcctccattttaagatagacttttgtaagtaaaagtttactgtttccagtggaaggaagttgcctctttccaaacagtaccaataaaagttccaaggctgactcatgggtccaactatagckgtgtgtcccaaactgaactgatttctgtgactctgataacccagcatgagtcatatacctacttctagaactggtgggaagccctgtcccacctaaacctcatagaatgagatgggaggaggaatgattccccccaaaataccaggttgttactagaaggggaacagatgttaggtgagcaaaaacaaaagctgtctcctgtagatgcacattgtaaagaactttgaatgtccattttagagatttgaacccaatgtgagctatgatggaaaaccattaatcattttgatcaaagataagaaatagaaatgttagcccaaatagattcaacaacttaaatatatttggttatagtagtcaaaagcacttctatcattttggattttgcccagtttaagcctctttttctatagttgactccttgtttggtaagaaaaatcatgttactgtacagtgtgtgctttgaacaagttactgatagagaaaggatcaagtccactcattgagatgatttggagggtaggtatgtttgacaggggataatgaaatagaatctgagcaattttaagagtrtcttactaaaagcttccattaaagttagaaggtatagataagaatgattaaggataactgttcaattatggtatagccacttgctatattaaaaggataccaaaaacaaaatgctttgttagaaacrgagatggtaagtttttgggacgttaactgctccagatacgtagtgttgtgtgtcttatgatgctttgacttttttcatcttagttttagtcctaacttagaatgattattttttcttgccactgaatcaacttcttttcttatttgggagattacaagatttgaaaaatacttctgtcataacaatttatattttgcaaaataactttgatggtgatttaagttgtttacccaattttattcattctaaatatctgtttatataaaagtattttgaaataaatgtttaggaagaaaaagatgaatttatacattatgaatactgtaaatagaagattcagtcatttttatatatgaaatgggcctatacaaaaatgaaatggagttggtctagctccaaaaatgtaatgaaaatgacagctgggcccagatgacgctaccatgatgtaaaccagtaagtagacatggttccctagtgctttctttgtcatggaagtcatccagagtaccaagagcatactccataccctgcgtggtggagaaaatctgcttggtcagaggagctccaaattgtagatggtttaaaaatattttagcctggatgagccccatcagcagcactcacacacctaccctgttaccacataaattcttgctgtgccgtagttccacacttaagcattctgttccttccctcattgacctgtttaaactttcagtacactagatatggccatgtcaagctgtaattcattctttgttctgaaaacaacctttggcaactcacaaaaattcaaaaataccagcccattcacctaaagacaatatagttatattccacattacaaatttaaaaaaaaactcataaagcttcaaatgatattgtcaaatattttaatattagtttgtaaatattatagagtgtttatagcttaactattttgaaatacatttctatattgattgcttatatttactatttaggcatacartgtttccatatgtatgtttaagaaatgtcaattacttttttattccaagtttcacagtaagcttgcataaagaaaacaaaaaggaaaaagatgtcctaaacattttttcagttgcttctggtcatttatatgaacgttttttaaggtaggtatattttttaaccttatattttgaaaaagaaatatttacatggttcaaatttcaaaaaaaaataaaggaatatacactgggaaaaaaaaaactcccacctctgtttccttgatactcagttccttttctcacaggaaacccataatattatttttatatcctgctaaggagatacatacacacacacacacgtaaatatatatgtgtatatttatttatttatttcagttgtttaagtccttttacccaaatagtaaagaacatactactttacaccttgctttttttttttacttaaaattatgaggtaagtatatataaatatgaaatttcatgagtttggcttgatttggaatattggttttcttcaaggctagcaaatagacattttggataggtaagaatatatatatatagatatactcacaatatatatatttacagtactttatatatacaatatttatatatatataatttactatagtaaattatccttttccagtgaagaaaaccttgttttataaaaaggaagggaatgaggggagaaatgcatattgcaaagtacaaaaggctatttttaaacagtttatatagaaaggtcacagagaataactcaaaaatatttgaattgtagcactgatacgttaaaatggaacttcagattcatttgtatcctttccatttggaggtttaggttagcaaaccaaatgacccatccagtgaatttgtcaatatagatagatcattcagctcttcagggtttgtagacttaatattaatcacacagtcatggacagctgggcccaggtgaagctaccatgatgtatatgtattcatccttacacattacatacttgataaaccatattttagtttatttcttcacatttcattgtgaaaaccttctaattcataccttcaattatttaaaagcctttaaaagacctatgtaacaaacctgtatgttctgcacatgtatcccagaacttaaagtaaaatttaagaaattaaaattaaattttaaaaaacacttcaaggttaaaaaatatatatgagctcctgttactgttaatgtatattgggtttaatattcttttwtacagaattatgatgctttctgttttgcgtaacaccaaaacaccagtgaaattctggttgctaaaaaattatctctcaccgacatttaaagtaagtacatagctttttttgtagaatggttaatgtttgaatagtaaattatttgtatcattgtaagtttatatgatatttctcttttcagaataagctttttgaaaaaatggtatttagtatttttatgtagcttaagaaaaattctgtacaatttttatttagagatgttcaaaggagaggacagaagactgtatatttttaagtaaaatcaaaatcagaatggctagtagtttttcatgataatgagtaattaaatacaatttggcaatggaaaatatatacagattttcaattaaaagaaatggattctgtcatttttgcaaagataggcagaaacagtagtagtatcaagaaaatacaaagactatacctataccgtagaaaatagttttacagtactgaaacaaaaaagctctttcgtctgtgtagtgtattgattgctgggcaccatgatctgaggcattttatatttagaagatttcaggtgatcaacagctattaccctttactcagccctatactcctgctacaaagtatactctgtttcttcctattctccctacagcataatcaaattccgtgaaatttagtgtctccgcagcaatttggtgtctcattcaacagcatttcaaatgagtttgttttttctagaccaaaagcagtgggaaaacagaagtaaaactagccaagcatgcttttattccttaatatttctaggcatgatgccaagtgtttaactgacgttattcaattgtttttcataacaatcccacatgataagaaaaccaagattcaaaagttacgtaactagcttgcacagttgagaggtacctgagaccacttttagattcaataacttactataaggatttatataactccaaaaaacagctgtgctcacagttacagtttttatagcaaaaggacacaaataaaatcagcaaaaggaagagatgcttagggtagggtccggggagaccagacacaaagttaacagttgtcctctcccagtagaatcccgttacagtggatagcacttatttcttccagcaacagtgtgtgagggtactcgtggagtattgccaaccagggaagctcattcaaactttgtggtacagagtttttattgagggtcagctgtgtggacttggctaacggcctgcatgactaaccttaacctctaaccccttcagatgttgaactgatgctttgtggcccaaggtcctcactacaaataacatcattagcatacaatatctagtgtggtccgagatctgcaggtaaacgtagacattcttattagtcaggaaattccaagggtagaggatatttcctgggagatagggtgaagggccagggtaggggatatttcctgggagatmgggtgaagggccatacttttctttgagcaagaatcatcctttatagcataggcctgatatgaaacagctaattagaaacacagctgagatttgaacccaggcattcagacctcaggtgcttaaccttatgtaacagcccatttgccctccaccaccaacagtgtctcctcctatgctcatttgacagtaggaaaaaaaaaaaaaacagaaaaagaacctataaatatagataagaagttatactatttttctactaattttttaacatgctttcctagtagtcagacactgaataagggagtatttaacccaaataaactgagatagaaaaatctaaagattctcttagcaggaaaagatattattcaccagaacaatagtgctatgtctggattagaaagtcttgttccactgcatggccaaaagaaatactgtatctgaagtagtattttccttctttttgtgatgtgtttctttcattcaaaatttttcttttgaaaacttcttagtgaaatataacatatactcagaaaagtgcacaaatcatgaaatttagctttggatttttacaaactcaaacatctgtgtaaatcagcagccagatacagaagccgctagctactttagatttgttcctaccagtttagaaaagtcaaacctcctctcttcattcaaatatttgctaaaattatacatacttacacataattattttctgacagcactatacaaactataattccctctcccttttaatttttcttcatagcacttttttctgtagataatagtttatttctacctacttcctctaaaatacaagcctcatgaaggtcataatttgtatttcttttgttcactaatgtacccttagatcctagaacagtgcccgtttcagtgaatatttggacacatatttaatgaagaaaaaatattctttttattttatctgaatgttttattttattttattttgaaaccaaaacaatgactcctggcagctgttgtacccctaatttcaagatttcacagataaaattggtgcttcttgcatttaaaaaaaagtattttaaatctacattgttcttacaaagtcagagaaaaaaattaaacatataaccagaaactagtttcaagtaagaatcaagtggtaaaacgcaaattctatatttattaattcatcttttccaattcctttttcattttctctctcagtatttgagctcttgaactaaatttagcccacagtatatttcattaactgcttctgctttaaacagggaataagctacttctaagcctataagatactcaaatatgaaatattcagaccataatcactactttgtatttttaatccttgaattaaataatgatatatctcaaacatgaagctcctgtatagaatctaatttatcagcttagaacttattttgtgttttttgtatcctctcttcatctttacatctctgaccaaccaacctgttgacatatacatgaactatttgatatgtaggtgttccaagatccagaggcttttttttaagtcagttttctcaagtcagatgttaacaataaaagtatgggaacatttatcttccattaataagtttgttaaataatatagtgcacttatttttaatgacgttaaattatatagttttatttatacttgtgatttcatatttgttagcattttaatatttctcattaataagtatgttatagaagtagtatttagacatcttgcctattagtttataacaatttataggaagctttacctttttaatgttatttttttctctaaaacaaaactactttctcttgaacatattgtttgattttgtgtgtgtgtttttaggaagtaattcctcacatggctaaagagtwtggattccgatatgaactagttcaatataggtggccccgttggcttcgtcaacagactgaaagacagaggattatytggggttacaaaattcttttccttgatgttcttttcccactagcagtggacaaaatcatttttgttgatgctgaccaggtaataaggttaactactatttttagtaatacgcaaacattttttacacttctatcttaatatagagattaattcatgttgctcatgtttattatcttcattacggtgcttaagatacgattgtgatatataagcaaagtatctttaaaaacaaaaagtcagaattccaggggaaaattgaaggtattgtaagaagtaccatttattatttaggacatggaagttttctctctaaagtagtagttttttacatttgagaactaaaacaaatacttatattagtcataataagagtagttaatgaattcctgtaaattatgtgctgatatttgtttaaaactaggaatttcttcttgctagaaaagctagcagttacatacaactctcattcttccaccttcaacagcattctttcgcattcaaccaataaccaaattctcatcactctatctcttaaggaaaagagcattttaaatttggccagcttatgcctgtagtctcagcacttttggaggctgaggtggggaggaaagtttgagcccaggagttagaagtcacagtgagatataatcatgccactgcactccagcctgagtgaaagagtgagaccctatctctaaaaataaaagcaaataaatttggccaaaaaaaaaaaaaaaacacccaaggccctctgctttcaaaatttatatgtccaaaaattatgacttttcctttttccctccttgcattgcttttgcatcattagtgggaaaaaaaaattgaaaatacacagaatttctaagaaaaaagtaatatgtaaatgaaaatataaattaaatggataagttagaatttatgtggaacaaaaagtatatttcaatttcttttaagagacagggtctcactctgtcatccaggctggagtgcagtggcacagtcatagcttactgtagcctcagactcctgcattcgagccatcctcccacctcagcatcctaggagctggaactccaggtgcacaccaccacgcctggctaatttttttttttttttttttttttttttttttacagacagggtctcactgtgttgcccaggctggtctcaaacttctggcctcaagcaatcctcccatctgagccccacacataatatctaatatgattctttctcctacctttctttcaatgtgtgcactaatayttttctagaaggcttgagcatattaaaaaataacatttatattattttattcaagctatttaraataattgggagatttttctttatgattcaaacttaacatttgccaatatacaataatggagatttggcatggaatgattttgttattcatacattgagaaactaaragctctgcacttacgtaatatttaaccccttccccaaatgtctgattcrtaaaatgacttgtttataaatgacataacaaaatattcttgttggtgagtaagaccactgtcttaaagactaggaatataaattttagtttacctttaacctgtaaggacaagaggaataaatgttaaattcagtaaattcatattacatgaaagcactgtgaggacaatacagctctttggatttctgtagtagagtaataatgatttgagattcccataaaaaagggcttatgttattttacagtctttatcagacagtctattttaattatttagattgtgagacatgatctaaaagaacttcgagatttcgatctggatggagctccttatgggtatacyccattttgtgatagccgcaggraaatggatggrtatcgtttctggaaaacaggatactgggcatcacatcttttaagacggaaataccatatcaggtaagaaaagtcagacccttaccatttagtaaataagtaatgtattgaattgcaactttcagttttcttaaaaattacacagttttcttaaaaattacacaataaaagcaaccaattacatagtgttcatttcatgccagtcactcttgtaagcctttacgtatattaagtcataaaatctttatgacaatcttttgagatactgttattacctccattttgtagatgtggaaactgaggcatacagcattcatgtaatttgcccaggcttaccctgctagtatataacagagctaagagttaaacccragtaatatggctcctaactactccagaagatttaaacttggtttgtgaaataaaattaagattatgtcttcaaagcctcatggccttttgtaaggccatgagtttcatgacaacttggaaaatcttggggtgaccctaaaagattatgggttctaccaaaattaaaacaaacttaaaactcttgggaaacagtattagatattaggagcaaatttatgaaaggattaattgttattagatcctaggatatctgtagttaataccgtcactgtagacactcactggaggaaagtaaaactaaaactacrtaaacaacataggctatcaagaagtaattcatttttgcagtgctttatatgtagtggatctcaagaagttcaggagarttggagcaggtgacaggctcaggagccagtatcaagctctcagtcaagatccaaacagtctttcaaacctagatcaggtaagtaaaatgttaacagaataattttgagtgtgtgtacatagactgttccaactccgtgctcataaactttaaagtcttatattttgagttttttctcaatttactgctgtttatgtaattatctattggatatttctacttatacataattttttcacctcaagctcaacattttcaaaactaatagtattttatcctcacttttccattctcaaacctctactttctactttatgccctgttttagttaccctttgtattagtccgttctcactgctaataaagatatacccaagactgggtaatttataaaggaaagaggtttaattgactcacagttctgcatggctggggaggcctcaggaaacttacaatcatggcggaaggggaagcaaacacgtccatcttcacatggtggcaggagagagaatgagtgcccagtgaagggggaagcccctcttaaaaccatcagatctcatgagaacccactcactgtcaagagaacaggatgggggaaaccacccccatgagtcaattacctctacctggtccctcccacaacaggtggggattatgggaattaccatttatgatgagatttaggtggggacacagccaaaccatatcaccctcttttttcttactcttttccatcattgtgtaaacatgctcaagtctctctctctcatctttaagacaaactcccttcatccagtgcacccccaccctgatattgccttaatattttctttcacctcacaagcactattttcctaatatcctatcaatttcctcattattgcatctgaaacattttagataatttaagcagaaacaaaagactctgtattcttttagcagaagcaaaagactcttttttcttatttttatcacaaccatgcatgttcattcattcatctgttgaatacctgctatgtgccagatattctcctaagacttcagacatcagaaaacaaaaacaagatttctttagctcatattttcattctagtagaaaaattttaaaaataatatttaaagataaatgttttggagagaaaaaccatgaaagcatgatagagagttcagaatagtgaataggggctggggcttgcaggtataaattgggtggccatatgtccctatgaagatgacttttgagtaaattttagatggaggcctaaaagctgacacagatgcaggccaaagagagtatctgatgcaaatgtcccaaggtgggcatgggccttccatgtttgaggaatagcaagaaagtcagtatggttgggataaagatggggggaataaagtaaaaatgaaggaaaagagttaacagaggctccagataatgtagaaagcttagtccctttgtttaaaaatctagtaagtgggaaattatatgtcaaaatatgaatgagttattcaagaccacactggtaaggagttgatttttttaatcattcttgaaaattgggagatcttcaaatatatatgtgtttacagactaaatagggtctcttcactattgccagttagtagaaaactgacttagggtcctcagtaaccctcaataacatgccagatttcgattatgaatacatttttggtaattcttaataattttaccaatgtatttttaaggaattcttagtcttaaatatgaatgaaagtctatgaagttgcctgttatctgcctatggacaactgaagaaaggattcatttttcaagcagttcggaaactgtccgaggtgttctcccagtactacattaccacattttggggatgattgtccttactcaaatgtagtttggctcccactccctccaatccacttaacacttctcagtaaaatcaaaatatcttttttcttaggtaaaaatgtgtagtgagcacttcttgtttgtttttatgtgcctctttgcagcacggatgttttcaacctctcctttcttgacactctcttgactctctattggcttcyatgtcagaccttgctggttcttctttgacatccctggctttcccaccacaattttgttggtgaactactttttctctacttttcctttaaatgttgctattctctacatctctgccttgacccacttytcactccataccatctctagcggcagtcttgcagccaatcatggttttaatttatatctttctgttaatagttcccaaatcttatctctgtctcttagctttcccttgaattcccaactcctatattaactctactggcattgccacattaatgaccaaaacttacctcaaattaaaaagtcaagaactcaagttctgttcctcttccaccattccctccatcagcaaataccacttagctgcctgttacaggttggattactcaggaagccacctaattctaacatggaaattaggaagtttattaggaagtactctcaggaccaacaactgtggaggaaggaaggaaatggaattggggaaactttacaaattcaattaagacctcagttgactgaccccacagggagctctgaagctgagatggtccttcatagttttcacaggtttgggcaagtctttattccttcatatcaaccagtcattggatatgggctgccccaggtaagggggtgaccttgggtgagacaactcttttcctggtctaatacaatgttatatagaatcctttgtcagtagataactataaatccttggataatggtgctaagtttctgtgagcaagaaaggcaaacccatacatagaatatgtgtataggtcagtccagaagaatctatataaaggacatctactgtagccaaattaccatcaaacagctgattggtctttgcaaagtataagtgctatattagaagctcagtgtttacctctgctgttggcagctctaagagctagatgagcctgggtaagtaggagctcatgctgttgggcccgtacacagtctccatctctgccagcatgtctactccattcatgtgcccattgtgtcattggagtagcctatgatcaaggctagcagacttccacaaaccacataattttgactgcctagttatttagtgctgattctgtgttgaatgctttctggtggctgtttaacatgaagtatccaaaggtcctaacagtttatgccactcccataggctcatccagaagcctctaccccagaatttcttgcccttaatcctcctatttttctatttcttggcctctgaccaattggtcaagccattcaccacttcttatgaatatactccaactatagactacttttctttctacattcatgtacttcattattcagtttgtacagaaagaaaggtagcctatggttggaatatattcataagcaactaaaatagttcttagaaataaatttatagcactaagaacttccattagaaaagaaaaaagatctcaacctcatcttctacctagaaactaggggaaaaaaacagttaaaaccaaagtaaggtcttggctaatgcaataagacaagaaaaggaaataaaaggtatacaaattgggaaggaagaaataaaactgcctttgtttgcaaatgcctacttagacaatccaaaaaaatgaccaaaaaaaaaacaaaaaacagtgtaccaataagggattatagcaaggtcaaaggttaatatataattaatatataaaagtataaattaatatataaaarattaatatataaaagttagtcatttttactacctatcaggtactatgcttactacctgggtgacaaaataatttgcacactaaacccccatgacattcaatttacctatgtagcaaacttgtacatgtacccctgaaccaaaaataaaaatttaattaacctggagcaaaagactgaatccaaagtctgtgggcttagatcaggtgtctgaaataaagaataaatataataaaagaaagttatttataaaaaattaaatgctattttgcataagatacttttttttttttttttttgagacagagtctcactctgttgcccaggccggagtgcaatggcactatcttggctcactgcaagctccgcctcctgggttcacgccattctcctgcctcagcctcctgagtagctgggactacaggcgcttgccaccacgcccagctaattttttgtatttttgtattttagtagagactcggtttcaccatgttagccaggatggtcttgatctcctgaactcgtgatctgcctgccttggcctcccaaagtgctgggattacaggcgtgaaccactgtgcctggccataagataaattttttttaagtatattaaaattattcccttatgtttataatatacatttttagggttgtattttctttttaataatatcatttgtgtagggatctttgcacattgcctgatgtagatttaagaatataatctatatgacaaagaaaaagtcatttttctgtattccaacaataaacaagtggaatttaaaattaaaaacacagtatcatttaaattagcaccaaaataatatttaagtataaatctagtaaatgtttctctacatgaggaaaactgtaaaattctaatgaaagaaattcaagaacactgaaatacatgaagaggtattccctgtttatggataggaagactaaattgctcaagactaaattgatgaattcttcccagatcaatttatagattccacacaattccaatcaaagtcctagcaagttgttttatgattgtcaacctactgattttaaagtttatatagaaaaggaaaagacctagaataaccaacaccatattgaaaaagaagaaagtcagaagactagcaataccagacttatttcactgtaaagctatagtaatcaagacagtatgttggcaaaagaatagaaaaatagatcaatggaacaatagagagcccagaaataaatccacataaatatagtcacccaatctttgacagaggaacaaagatagagcagagatagtattttcaacaaatgtcactggaacaactgaacatctcataagaaaaaaatgaatctagacacagatcttacacccttcagaaaaattagaatggtttatagacttgaatgtaaaacacaaaatgcaaaactcctggaagacaatataggagaaaacctagatggccttgggtatgtcaatgactttttagatataacaccaaagtcatgatccgtgaagtaataattgataagctggacttcactgaaattaaaaacttctgctctgcaaaagacaataacaagagaaagaaaagtttttttggcaaaaatatatttgtaaaagatgcatctgataaaggagtgttatccaaaaaaatgcaaagaactctaaagactcaacaatcagaaaacaaaccaaatttagaaatggatcaaagaccttaacagacacctcaccaaagaacatatacagatgacatataagcatatgagcagatgctccacatcatatatcatcagggatacacaaattaaacaacagtaagataacaccacacacctattaggaaggccaaaatccagaatactgacaacaccaaaggctagtgaagatgtggagcaagaggaacttgcgttcattgctgagaagagtacaaaatggtatagtcactttggaagacaatttgacagtttcttacaaaactaaacaaactcttaccatacaatttagccattgtaatttttggaatttactcaaaggagttgaaaacttatggctacataaaaacctgcacatagatatttataacacctttatttataattgccagaatatgcagccaaccaagatgtcttttagtaggtgaatcagtaaagaaacgggtacatccagaccatggaatattattaagagttaaaaagaaatgagctattaagccatgaaaagacaaggaagaactttaaatgtataataactaagtgaaagaagccaatctgaaaagattacatactgtattattctaactatatgacattctggaaaaaagcaaaactatggagacagtataaagataagtggttgtcagagtttggtggcagggagggggcaagtgatgaatatggtggagcacagagaatttttaggcagggaaaatatgtagtggtagatacatgtcattatacagttgtccaaacccgtagaatgtacaacaccaagaaagaagtctaatgtaaactgtagactttgaatgagtataatgcatgaatgtaggttcatgtattgcaacaaacatatcactttggtggggggtgttgataataggggagtaggtaatgcatgtgtaggaacagtgagtatatgggaaatctctgtgccttcctcttaatttggctgtgaacctaaaaactgctctaaaaaaataaaatttttaatttagaaaaaattaaatagaaaaaaggaataattaaggttagaatggcaatcagtaaaataaaaaaaaaaagaaaagaaaagaaaagaaagatgcatttttgtagatttttaaaaatgaaaccaaagctggttctttgagaaaatcaacaaaaccgatgaacctctatctagactgatcagaaaaaaaaaggtaaaagacacaaattaccaatatagaaatgtgagacatgacagcacacagattctacagatactgaaagaataatcaagggactattagaatcaactttctggtaataccttcaacaactttgatgaaatggccaaattacttaaaagacacaaaccaccaaaagtcagaacgtgaaataggtaacctgaataacactgtatcagttgaagaaatggaatttgtagtttaaatccccaggcccagatagcttcagtagtgaattctatcaaactttaaagaaagaaataataccagttttacacaaactcttccagaaaattgaagagaagggaatatttttcaactcattctatgaggcagcattcccttgacatgaagaccaaagatattataagaaaggaaaattatagacaagcatttcttaagaaaagttgtaaaaattgttaacaaagttttaagtaatcaaatttagtaatatataaaaaggacctctccctcctccccccctcccctcctcccctctgcacggtctccctctgatgcccagccgaggctggactgtactgccgccatcttggctcactgcaacttccctgcgtgattctcctgcctcagcctgccgagtgcctgggattgcaggcgcgcgctgccacgcctgactggttttcatatttttttggtggagacggggtttcgccgtgtcggccaggctggtctccagctcctaaccgtgagtgatctgccagccttggcctcccgaggtgccgggattgcacacggagtctcgttcactcagtgctcaatgttgcccaggctggagtgcagtggcgtgatctcggctccctacaacctccacctcccagccgcctgccttgccctcccaaagtgccgagattgcagcctctgcctggccgccaccccgtctaggaagtgaggagcgtctctgcctggccgcccatcatctgggatgtgaggagcccctctgcccggctgcccagtctgggaagtgaggagtccctctccccggccctcatcccgtctaggaagtgaggagcgtctctgcccggccgcccatcatctgggatgtggggagcgcctctgccccgccaccccgccaccccgtctgagatgtgaagagcgcctctgcccggccgcgaccccgtctgggaactgaggagtgtctctgccccgccgccaccctgtctgggaagtgaggagcgtctctgaccagccgccaccctgtctgggaggtgtacccaacagctcattgagaacgggccatgatgacgatggcggttttgtcgaatagaaaagggggaaatgtggggaaaagaaagagagatcagattgttactgtgtctgtgtagaaagaagtagacataggagactccattttgttctgtactaagaaaaattcttctgccttgggatgctgttaatctataaccttacccccaaccccgtgctctctgaaacatgtgctttgtccactaagggttaaatggattaagggcggtgcaagatgtgctttgttaaacagatgcttgaaggcagcatactcattaagagtcatcaccactccctaatctcaagtacccagggacacaaacactgcggaaggcggcagggccctctgcctaggaaaaccagagacctttgttcacaagtttatctgctgaccttccctccactattgtcctatgaccccgccaaatcccgctctccgagaaacacccaagaatgatcaataaatactaaaaaaatttaaaaraaaggatcttatatcatgaatcgtgaccacatgaactttatcccaggaatgcaagactgattcagtattagaaaatcaatgtaactcactatattaaggactaaaatacatatccatatatatacatgatcagctaattatatgcaaaagagcatttgatatactccagtatcctttcctgatttaaaactctcagcacactagaaccggaagggaacttcctcatcctgataaagggcatctatgaaaaacctacagctaacatcatacttaataatcaaagactgaatgctttctccctaagatcagaaacacagcaaggatatccactcttacctttcctattcagtattgtactagacagatacctagtacagcaaggcaagaaaaaaaataaaaggcatccagattggcaaggaataagtaaaactggctgtcttggacgggtaagggggacagtcaatgtgatcatctaggtagaaaacctcatgtaatctaccaaaaagctagaactaataactgcatttcacaaagttgcaagatacaaaatcactatgaaaatccaattctrtatactagcaataacaattgaaaattgaaattatccatttctgtagcattttaaaaatgaaaaacttagtggtcagacttaagacttacagattgaaaactacaaaactgctgagagattaaaaatcagctgaatatttagagagatataccttgttcatggttggaagactggatattgttaagatgtggtttctccccaaattaatcactagatttaatgcaattccaataaaaacattactctctattttttctatatttattagactttcttgtacaaattaatgaagttgattctaaaattcaaatggaatgccgtagacctaaaatcgccaaaacaggccaggcgtggtggctcacgcctgtaatcccagcactttgggaggccgaggcaggtggatcacttgaggtcaggagttgaagaccagcctggccaacatggtgaaactctgtttctactaaaagtataaaaaattagctgggcatggtggcgggcacctgtaattccagccacttgggaggctgaggcaggagaatcacttgaacccaggaggtggaggttgcagtgagccgagatcatgccattgcactccagcctgggcgacaagaacaaaactctgtctcaaaaaaataaataattaaaaataaataaaaaataaaatcaccaaaacaactttgaaaaataagaaagttaaaggacttataccaccttgttttaagacataatatatagctactgtagtcaaaatagtttggtgttggtgtaaagatagacaatttgatccatgaattagaataaagaacccagaaatagaccccatatatggccggttgacttttgacaaaggtgcaaagataatgcagtggagaaaggatagtcttttcaacaaacagtgctggaacaattagatatccttatgccaaaaaaaaaccccaaaaacctctaaaccctaatatgccgtaagtaaaaattaattccaaacacatcatagacaaaggtacaatataaaatgtttagaagataggagaaaatctctgtgatcttgagttaagcagagattttttaggtatgatactaaaagcatgattcataaaagaaaaaattgataaatatacaaagagctcccaaaacttattaataataaaataagtaatctgatttgttaaagaatcagattgacccatcaccaaagatgatcaagtgtcaataattccatgaaaagatgctaaacatcattagtgattagggaaatgcaaattaaaactatggtgaatacacaccaattagaatggttaacattaaaaagactgaccataccaagtgttgaaaggatatatacctgctagaattcgcatacattgcttgtgaaaatgagtgtaaaatggctaagcccttttgaaaatcagtttggcgatttcttttacagtttaacttaaacctgccatatgattagtcattatacttcagggtgtttacccaagagaaataaaagtacctggccacacaaatgcttgtacataaatactcatagtagcattattcataaaagccaaaatctagaaacaacccccctgtatttgttacctgttgctgcataacagcttatccaaaacatagcagcttaaaacaacaaacagtttgtgtggatcagttcctgtagtctgacctagctcagtgttctgcttcattgtatctctcaagactgcaatcattgtgtcagcccggggactgccgtctaatcaaaagacttgactgctaggcaaagtcactcacatggttgtggacagggtttattcttcaagagctattatacggaaagtctaatttccttgctggatgtggctataggcagtcatcagtttctggcagatggccttatccataagggcaaacatgagagagaagaatcagagaaagagaggatgccaacaaaatgaaagtcacagtctgttatagtctagtctcagaattgacatcccattagttttgccatattctgtttgttagaaggtagtcactagatccagccagaccaggagaaggaattgcacgagagaatggataccagaagtcaggaattattggaagccatatcagaaactgcctactgcaaatatctgtcaagaggagaatagataaaaagatatggtatattcatagaatgtaatactactcaatagtaaaaaggaatgaattatttatacacagacaacatggatgactctaaaaataacaatgctgatccataccaaaagtatatagatttatatataatttatatgaaaagtcagacctaaagtatttgtattatataatcctatttatataaaattgtagaaaatgcaaactaatccaaggtgaaaaaagcagttcatgcttacctggggactggattgggtgcatagaggaaggataggagggaacaattgcaaaaggacacagggagtcttaagggtgatagctatattcaattatgttaattatgtgatggtttcacagaaatatacatatgtaaaattctttatgcccagtagtggtactggcataaggttacacatattggtcactagaatagaattgagagttcagaaataagcctatgcctctactctcatttgatttttgtcaagcattccaagacaacttaatggggaaagaatagtctttttaacaactatgctagacaacaggaaattcacttgtaaagaatgaagttggacccctacctcacatcatatataaaaattaactcaaaatggatcaaagatttaaatgtaagaactaaaaccgtaaaactcttagaaatgaacataggtgtaaatctttgtgactttggattaggcaatgtttttaagttataaaaccaaaagcacaagcaataaaagaaaaagataaattagcatcaaaatttaaagacttgtatgctttaaaggacacaagaaagggaaaagacaacttttagaatgggacaaaatatttgcaaatcatgtgtctgacaagatactaaaatccagaacatataaagaactcctgtaggatgtgagggcaatctggctgctacatctgtcaccccattgatcaccagggttgattcagctgatctggctggctacgcaactgacctcttcctccctcactgctccatgtgtgttcctcccgaaactgcatgctgggttgaagaagatgaccatccccaatagaggaggaccaatcttcagtcaagggtacactagtagctgcgcttccctgccagaacctccaaacaagctctcaagaactcccataactcaatagcaaaggaaaataaccaatttacaaagtggtcaagggatgtaaatagacatttaagcatgtttatttttatttttattttccgtgttttttattttactctaagtcctgggatacacgtggtgaacgtgcaggtttgttacgtaggtatacatgtgccatggtggtttgctgcacctatcaacctgtcatctaggttttaagccccacatgcattaggtatttgtcctaatgctctccctccccttcccccagccctccaataggccccagtgggtgatgttcccctccctgtgtccatgtgttctcattgttcaactcccacttatgagtgagaacatgtggtatttggttttctgtacctgtgttaatttgttgaggatgatggtttccagcttcatccatatcctgcaaaggacatgaactcattcttttttatagctgcatagtattccatggtatatgtctgccacattttctttatccagtctgtcactgatgggcatttgggttggttccaagtctttgctattgtaaatagtgctgcrgtaaacatacatgtgcgtgtgtctttatagtagaatgatttatcatcctttgggtatatacccagtagtgggattgctgggtcaaatggtgtttctggtcgtagatccttgaggaattgccacactgtctttcacaacagctgaactaatgtacactcccaccagcagtgtaaaagtgttcctattactccacatccttgccagcatctgttatttccagatgttttcatgatcaccattctaactggcatgagatggtatcaaaaccactcattgtggttttgatttgcatttctctaataatcagtgatgatgaactttatttcgtatgtttgttggtcgcataagtgtcttcttttgagaagcgtctgttcatattcttcgcccactttttgatggggttgttttttttcttgtaaatttgtttaagttccttgtagattctggatattagccctttgtcagatggatagattgcaaaaattttctcccattctgtaggttgcctgttcactctgatgatagtttattttgttgtgcagaagctctttagtttaaatagatcccatttgtcaattttggcttttgtttctgttgcttttggtattttagtcatgaagtctttgcccatgcctgtgtcctgaatggtattgcctaggttttcttctagggtttttatggttttacattgtacatttaagtctttaagcagagatttaaatgtgtttatttggagattttaatatgtttatttaaatagacatttaaatacgaaatatgtctatgtaaatagacattgtatgtgtttactagccattgatatatcttctgtgatacacaaatgtccaataaacacatgaaaagatgctcaatgccattgtcattaggaatagcaaatcaaaaccacaatgagataccacttcatactcgctatgatagctacaataaaaaagattgacaataacaagagtggacaaggatatggagaaaatggaaccatgatacgctcctatttggaatgtagaatagtgtaccaagttcaaaaacagtttgacaggtcatgaaaatgtttaacagagttaacatatgacccagcagttccactcctagatatatacccaagagagttgaaaacatgtgtccaaacaaaaatttgtacaaatgtttatagaagcattgtttataacagctggaaaatggaaacaacccaaatgcccatcagttgacaaatgaataagccaaatgttgtaaattcatatagtggaatattatttggctgtaaaaaggattgaagtactgaaatatgtcacagcatagatggaccttgacaacattgtgctgacagaagccagacacaaaaacctgataatgtataattttacttatgtgatatgtccagactaaacaaattcgtagagacagaaagtagattattaggtacatggaggttagggaaggatatgaggacagtgtgtgaaataatcagctaaagatcagctaagtgacaacagagtagacccatatatataattgacagaattaaagttcccctaagatttatattcaggaggttaaaatgaaaaaacagtcggcatggggggtagtgtgtgtgtgtgtcctgtactcatggaactcagccatgttgagttccatgagaacagttacagagattgagatttaatcaggactatgactttgtcaagaaagtacaactaagtgagagaagaataagacagttgagagtatattcagaagaataactatataggggtgaatacatcaaggaatgagggacagtgaaatagtggtaaaatcagtwgattggaggttccaaggggtcaaaggatattgatatctgagtactcagtggagtgagccaaaaatcaagaggtggtcagagagtggcaccatgaaattgaaagtatagaagacttggtctagtatataaccatttgagttagtagcttagataatatggtaggccagrttatttaaggaagggattccaaggaactaagggtgtcagaagggacagttaaggtttttctttctttgattaacggactttatttttttagagcagtcttaggtttacaaaaaaaatgagcagaaagtatgggtaattttctatttctgggctctttattgtgttccattgatgtatttgtctcttatttttccaataccacactgttttgattactgtaactttatagtaagacttcaagtgtggtagtgtcagycctctgactttattcttcaatattgtgttggatattctggatcttttcctttttccctaaactttagaatcagttggccaatctccacaaaataacttgctaagcctttgattgggattgtgttaagtctatagataaatctgggaagaactgttatcttgactatggagtcttcctatgtgtgaacatagaatatctcttcatgtatttcagtgttctttgatttctttcctcagaattttgtagttttcattttgttgaggaacatattttattagatttatgtttaagtatttctctttttcggtgctaatgtaaatggtgtgttttcttaaatttcaaattatgtttgttcattgctggtatatagaaaagcagttgacttttgtatattaactttttatcttgtaacattgctaaaattgcttatcagttccagaagttttttcccttgattcttgggattttctgcataaacaatcctgttatcacaaacagtgacaggtttttttcccttcccaatctatatacattttccttttcttgtcttattgcatttgctaggactttcagtgtgatgtttaatagggatgttgagagaagaaccttaaaattgtgaatcttggagcttatgtaggacaaccagcacaagtacccttcatactcttggagagagaggaacatgcctttgctcttgaatataagcagatcttctatagggaaaggaagggaaggactccacccctggaatataaacaaatatctctggggaagatttgtctgattctctccaaaggtctctaacttactaggctagtttgccagtcaaacatccattaacccagatgccagcaatctttacttagagagctctgagcatgcagaaatgggaaaatattcatggatcattgtttccaatggggagatgaaaattcacctcagaatccagagagcattgtggtgaccaatatgaacagtaattgcaggcataatgtgagcaatagaggcagatagaggtagtgaggctgtccattgtggggactattgaatggtaggtttctatgcctccttcttcatccttgttcccaggggtagagtctaggagagatgtaggtatattccagtgcatggattcattcatgacacaagatgattggatcaccttaggtattttaagctttaaagtgtagagaaatctcagatttgcrtatgttttatgatctgtttacagtctaactgatgtcttacttcattcagcttctttccttctgactctaaatttcatacgtctatgattaaatcacaattttctgtaggatctccccaataatatgatttaccaagtcgccattaagtctcttcctcaagactggctgtggtgtgaaacctggtgtgatgatgaatccaaacaaagagccaaaacaattgatctggtgagtgtctttgttttcatttgtatgtaagcagatacagaaatgtttaaatagaaatattttctttctgttttacaaagggagtggcatacgtattacttcgcttcttctgctgttcagtctattacacatttacttaggttggcaagtatagggttattttgggggcccccaagaccaccctgaggtttgatgattcactaaggagattcatgagatgcaaaatataatcatattcatggctatgatttatcacagtgaaaggatataaagcaaagtcagcaaagggaaaaggcacatggggcaaagagaaaatcaggtgcaagattccaagagtcctttctctgtgatatcacacgggacaagcttcattcctcaagcaataagagattccacaaccagtgtgaagtattacctactaaggacatttattagaaaccccagtgtccaggggttttactgggggctggtgaccatatagcactgtctgcctgagacacacctaaatttccagcactcaggaggaaagcaagtgtttagcataaacacctttgcacagataatttagacacagtgagttactcttataaaggaatggtgagaaccatcctgaaccctgtgttcccagatgccagcgaggagccaaacttacaagcaggtctttctaagaatagcaatttcaggctttctgtattaactcttttctgcaaaaggacttttgaaaaaaaggcttagagggctgggcacggtggcttacgcctgtaatccctgcactttaagaggccgaggcaggtggatcacctcaggtcaggacttcgagaccagcgttgctaacatgatgaaaccccatctctactaaaattacaaaaaattagctgggcgtggtggcacatgcctgtagtcccagctactcaggaggctgaggcaggagaattgcttgaacctgggaggcagaggttgcagagagcggagatggcgccactacactccagcctggagacaagagcaaaactccatttcaaaaaaacaaacaaacaaamaaaaagggctgagagctagctgaaaatgtttgtggattagctatcatcttgacatgtcttcagtttagttatcctgccaatattttcccccaaataaaggcaaacaagacaattttgtctacytaaaatatatcatacatgcttttttcttacttatttttaagagattatttttcctagattttcatttaaagcagtttatgctgtgcagtttaactctcctaaacataaaatatttcaaagtaatttatttgttgtccatttagattttatattccactactaccttgtctttagtaggtataataagtttttttcctagtatattgtttttaatgtgctaagtgtagaaaattgtttacaagatcttcactgacgaataagctattaaaatgttagaattcacacaattttgaacaaaaaagagcaggaaaacaaaatataggaactttttcagacatgtatagaaatacatattttaaaaatagcatgccagcatgttagaatgtaatcatagttggtagaatatagcagaaacaaataaaaaggcatttttaagaggtaagcaagggaatttcataaagagaggccaagaacattattgaacacaactactaatatgttgttagggttctgttgtggctcatacagtagtggtgtaggtcattttgggatctttagtacttagactaacatgagctaccataacaaacccccaaaattcagtggcttcatactcattccagcagcagacctaagtggatatctccgtcattgagtagccctcctgtgtgccatgtctcagggagtactttttgtccacctgtaactgcttcttccagtgcagtagccacttgccttatgtggctgttgagcccttaacatgttgctattctgaattgagatgtgctgtaaggtataaagtacacaccagattttgaatactcaatacaatgaaaataacatatatctcattactaatttttgtattgattacatgttgacttagtattttggatatattgggttgaataaaatatagtattaaaatttatttcacctattcctcttacatttttatacatggctactagaaaaatttagtatttttctagtgaaaaaacccacaaattatgtgtatggttttcattgcatttgtattggatagtaccaatctggagggaaggggaaaaaaagtgtggagaacatatatcttgaatcctaaaggcatggccccttggtgggagttggtcacgtggccatatctagatgtaacaggagctgagaaatggcattcctggatggacagctacttcctagcaatagcaataccaatacccaggaaaaggagaagtggcacaaattttggtgttcagcccgtctccctcatagaaacactaagagtagaatgagagaacatgctattcttcatggaggagaaaagagaatgcagaaaattcccaaggaaatggcctaacagaagaaaagagcatgactaataatattgaaggtgggaatgaaaatgtttatgaatgtcattatactctctcaactttccatctcagagtttttcagcctcagtactattggcattgaggagtggagaattctttgttacaggggttttcctgtgcattgttgggtattcagcagcatttctggcctctgtccactagatggcagtagcaccccaccactccccggccatcacacattttctccagactttgccaaagctccccgaggggcatgattacccagttaagaaacactaataaagcttatagagtgtatgcatgagcacacacatacacacacacacacacaaacccaatgtagtacaaatagctaaacaaaacataatatttttatttttttaatagtatgacagaattaaaaaaagaattagtcccattatcttcactatatagaagacattgcctataaagttaatttctgcaaggaaaattgtgttgtccacttacctcaggaatatgtcactatggaaaagaaatccataatgaatcaactgaaaatatttggtgaggaaagggttaagacaacaggctcacggctcatgactaatagctttcccctaagaaataagaggaaagcaagtggagaaaatgtcaccagaagtgagcttcaagttgcttcctgccttaattctttgtaaatagtgaatgggcttcctttattacttgatgaagtttatactgctcccattgtcttctgtctcagtaaatggcaaatccattttttatattgctcaagccaaaggtactggtggctttgtctttctttgatgcctctctttacttacagctcacgtccaatatatcagcagatcctttcagctgtaccttcagatacatagtgtgtcagactcttatcaaccttctataatttttgcttttaactttaatttcccaagaaactctatagtagtactcaatagtttaaactgattgtgtattgatggaaccttagagattttcctattttaatttcttttgcagttgaataaattaagctacacaccctacacacacacataattatgtgatacatacacatcctactactagtaaatatggagttggaaccctgagaaccgagatgccatttccatgtttttctactgtgcctacaaagcacactagtctgctatgttcttctacatagtggtaatgtaattagatcttttgtcaaaaagttttacataatttttttttgacagacttatgagtcatcagaatgtctttcaacaatttttatttaaatttctgattgaggtatttgtattaagcaattattacatacataagttgtgatatatcatttcacctgatcctgtgtgtattaaacttccagtacttagyaggactctgctttttataaaatgtattttgtttgccctagtgacacagcattgtccttatgtttccaggagcatggtctttcattaacaaaatttacttaaacttttagtgcaataatcccaaaacaaaagaatccaaactaaaagctgctgccagaattgtcccagaatgggtggagtatgatgctgagataagacaactattagatcatcttgaaaacaagaagcaagatacaagtaagtcatcaacgtgttgtgatgtctgaaacatgcgttgcattaatgagattagaatagactacagactcatttcttagtgaatttataaaatgattaagaatttctttaagaaagtctgtggcataatttaaaggtgtatttttgtgtagactaagcttacaagtttaaaacatagataatctgtttccccatggatacagcttcagctcataactctatatggatagatagtgtaacattagtctcctgacacaacatagaggtgaaaaataaaagtaaaaggagtgtttgtctttaagattgcactgaatttcctaaatgtgaaaatttgagcaagtcctaaaaattaataaaagctttacatagctaactaaaaatatcatttcctatctccaaaattaatctcatatataacagaggtttccctacatgtttgtggttctagtatgtttaatcatgggctggagaatgacttggattagatttgcttcaattccttttatgaaaaaaactgtggctaccttggcatttcattgccctacataagtgttcaacaaatgtgctgaatttattttttaaagctgatacaaacttcttgattgtcctgtaattctctttccctgtcagtgctgcctgtgtctccctattcttcactctttcttaaaaaaccccctgaactcctattgtgttcgggtcagtgtgttagagactttcactagattatattggctaatactctcaataattcttcccagtggttcagaatacagttctcattttcctcagctttactgtttagggaagccgaaatgattatgtataaactgtctcatataaacgtgaaattgtttcatcttgactttaaaaaaaaaaaaaagttttcctttaaaaaaaaaaagttttcttggtgtgttcaaaaagttcattatacacacccatgtatgtataataatttagtatagataaagatactatttcaattcataagaaaatattctgtaagtggtatgatatgactttttttaaagggagagaagtaggatgacaaagggaggagggagagaaggaaagaaagcaggaagaaggaagaaaggaaaattacctcaacaaaaaacatctttttcttatatataagtatttcttttatcaaattgggaaagaggtaacagttaataataatgagcattggtgagaatgttggaaagttagcatttttatacaagtaaacgtatagtagctgtataagttaaggaaattttatatgtataaaaacttaaaatttgtataccctttcacccagcaattcacttcaacaaacttaaaaaaagaaaaatgatgtctatattggtgtttattatagcattatttttaacaatgaaatagaaataatctgtccatcaatagacaattggttacataaacattgatacaaacaatgaaatacagtgtagcctttcaagacaaacaaggtaaatgtatttgtgctggcagcatattttaagttaaaaaataggttatagagcaatatttataattgatctcgtttccattaaagaaaaatcataggtctgtatgtatgtgtttgtgtatagatatgtatataagtaagggagagaagttttacaaaagagatttttttttattattattatactttaagttctagggtatatgtgcacaatgtgcaggtttgttacatatgtatacatgtgccatgttggtgtgctgcacccactaactcgtcatttacattggatatgtcacctaatgctatcccaccccctacccccaccccacaacaagccccagtgtatggtgttccccaccctgtgtccaggtgttctcattgttcatttcccacctatgagtgaggacaggcggtgtttggttttctgtccttgtgatagtttgatgagaatgatggtttccagcttcatccatgtccctacaaaggacatgaactcatccttttttaaggctgcatagtattccgtggtgtatatgtgccacattttcttaatccagtctatcatttttggacatttgggttggttccaagtctttgctattgtgaatagtgccgcaataaacatatgtgtgcatgtgtctttatagcagcatgatttataatcctttgggtatatacccagtaatgggatggctgggtcaaatggtatttctagttttagatccttgaggaatcgccacactgacttccacaatggttgaactagtttacagccttaccatactgtaaaagtgttcctatttctccacatcctctccagcatctgttgtttcctgactttttaatgattgccattctaactggtgtgagacagtatctcattgtggttttgatttgcatttctctaatgaccagtgatgatgagcatcttttcatgtgtctgttggctgcataaatatckttttttgtgaagtgtcttcatatccttcacccactttttgatggggttgtttgattttttcttgtaaatttgtttaagttcattgtagattctggatattagccctttgtcagatgggtagattgcaaaaattttctcccattctgtaggttgcctgctcactctgacgatagtttcttttgctgtgcagaagcgctttagtttagttagttcccatttctcaattcttgcttttgttgccattgcttttggtgttttagtcatgaagtccttgcccatgcctgtgtcctcaatggtattgcctaggttttcttctacagtttttatggttttaggtctaacatttaagtctttaatccatcttgaattaatttttctataagatgtaaggaagggatccagtttcagctttctacatatgactagccagttttcccagcaccatttattaaataaggaatcctttccccatttcttgtttttgtcaggtttgtcaaagatcagatggttgtagatgtgtggtattatttctgagggctctgttctgttccattggtctatacctctgttttggtaccagtaccatgctgttttggttactgtagccttgtagtgtagtttaaagtcaggtagcatgatgcctccagctttgttcatttggcttaggattgtcttggcaatgcaggctgttttttggttccatatgaactttaaagtagttttttccactgaatctatgaattaccttgggcagtgtggccattttcacaatactgattcttcctgtccatgagcatggaatgttcttccatttgtttgtgtcctcttttattcctttgagcagtggtttgtagttctctttgaagaggtccttcacatcctttgtaagttggattcctaggtactttattctctttgtagcaattctgaatgggagttcactcatgatttggctctctctttgtctgttaatggtgtataggaatgcttgtgatttctgcacattgattttgtatccagagactttgctgaagttgcttatcagcttaaggagatttggggttgagacgatggggttttctaaatatacaatcatgtcatctgcaaacagggacaatttgacttcctcttttcctaattgaataccctttatttctttctcctgcctgattgccctggccagaacttccaacactatgttgaataggagtggcgagagagggcatccctgtcttgtgccagttttcaaagggaatgcttccagtttttgcccattcagtatgatactggctgtgggtttgtcataaatcgctcttattattttgagatacgtcccatcaatacctaatttattgagagtttttagcatgaagggctgttgaattttgtcaaagaccttttcggcatctgttgacataatcatgtggtttttgtctttggttctgtttatatgctggattacgtttattgatttgtgtatgttgaaccagccttgcattccagggatgaaacccacttgatcatggtggataagctttttgatgtgcttctgggtttggtttgccagtattttattgaagatttttgcattgatgttcatcagggatattggtctaaaattatcttttgttgttgtgactctcccagtctttggtatcaggatgatgctgtcctcataaattgagttagggaggattccctctttttctattaattggaatagtttcagaaggaatggaaccagcttctctttgtacctctggtagaatwsgactgtgaatccgtctggtcctggagttttttttggttggtaggctcttaattattgcctcaatttcagagtctgttcttggtctattgagggattcaacttcttcctggtttagtcttgggagggtgcatgtatccaggaatttatccatttcttctagattttctagtttatttgcgtagagttgtctataatactctctgatggtagtttgtatttctgtgggatcagtggtgatatcccctttatcattttttattgcatctatttgattcttctctcctttcttcattagccttgctagcggtctgtcaattttgttgatcttttcaaaaaaccagctcctgaattcattgattttttgaagggttttttgtgtctctgtctccttcagttgtgctctgatcttagttatttcttgtcttttgctagcttttggrtgcgtttgctcttgcttagcttgttcttttcattgtgatgttagggtatcaattttagatctttcctgctttctcttgtgggcatttagtgctataaatttccctctacacactgctttaagtgtgtcccagagattctgatatgtccaggttgcagcagagagagaggtttaatcatagggctgccaaatgaggaaacagaatgaaaactcaagtctgtgtccctgagcagtttgtgactagtgatttttaagggttttggagggrgccagagtatggagagcattgattggtcgaagagtgcaaggtgaagtcgtggtatagggagatgaagaaactatattctcatgctgaattggttactttgtggggatcttcaaactggttggtgtcagctgttctgctggaactcacgatctgcttaggcaattcttaaaagccttatgattctgatgtcagaaatcccatccacaagaacaatggggatgcaaatggtcagtatctagtgctaagtaactttcagttacaaggaagtgggtcaaagtgctgcctgactaatagttaaccatacttctgtccagaattcttgtttaactctataaggatggcttgagatatagtatatcttttataatttacatttctctttttcattatattagtttgctagggctgctataacacagttccacaaactggctggcttaaactggacatttattgtctcacagttctggaagctgaaagtccaagatgaaggtgtccacagggttgataccttctgagggctgcgaggaaagaatttaacacagacgtctctccttggtttgtaaatggctttcttttccttatgtgtcttcacattgtcttcacattctctgtccttgttcagttaggacacctgtcatattggattagggtctacgcttatgaccttattttaacttgatttcctctgtaaagatcctgcctccaaataaggatacatttggagataccagaagttagaattcttgtaaattttgtggggaccaaaattcatgtatttttgaaatatgaattaaacccataacatgggtggagttaagaatcttgtcatatatttaaaggccattagtatttcttccgctgttcttgtcatttgcctgtttttttctagaggattgttgcctgacactggaagaaattaatttctgttccacacatttgtattgccatctttatcatatattaaattccaatattaggatgtcttgtttggccctttttattccgttccattggtctctgtctatacatgtgccaagtacataccactttaattattaaggacttatattatgttttaatatcaagtaaggctagcctttccttattactcttcttttttgttgtttttctgtgtattcttgttttttttccatacaagccttagaatcaacttagtttcagaaaattttctgtgtttttcttgggggkctgtgtgggatggtcagagaaaggattacattaattagttggcttgagagaattgacatcttcatggaaactactgtctcagaatacattgtctttctatatattcaagtccagttttcctcaagaatcataacattttaatcatatagcttatatatatatatagtttaagcttttctttgctactgttataaatggaatttttctcttgaagaatatcttcttactggtggttgcttgtacataaagactactttctatacatggatctttatttcccatgatcatactgaatttttatattggttgtagtaatgtttcagcttattctcttgggtttttccaggaatacccacatcttatctccaaataaagatggttttcccttttcctttctgatcattgtacatcacactgtttttgtttgtttgtttgtttattttacttgctttgacttatacatctaatacggtgttaaataataaagtggtggtagtaggcctttttccttactgtggttgaccaacttctatgtttccccgttaagataatagtgttggactgaagaagaatatttttatcatcttgaggaaataaccattgattcctattttaatatttttatcaaagatgggttgaattggttgcattttatcaacttattcaacagaaatagaggtgacacataatttttcaacttatagattataaactacaacattatttgtagtttattataaattataatctataactatattaatatatttcctaatatcgaatcattttttctaatattgaagcatccttgtattcctagaataaactccacttggcccyacaggttggctggacacagaagagcagtagcaatcactgtagtctggttctcagagactcctactcctaggagaaggggaagagcaccacatcaagggagcaacctgtgggacaaaagaattcagacaacaggccttgagtcccagatctttctgctggtgggagtttctttcagcagagacataattgcagtgctaggctcagcaggaaaaagtctggagctgtaccccaacattcaggcagacttggtgctcttggagggtcttggagaagacctttcccaccttgtccaccactgcagacacagctggggcttctcccacaggagctcagtgtggctgaacctatagacagccttcctggaacacttcagggtgactgcattgccgcaggagaggtatcctccaggttcaggcttgcacaagaggcagtcacaattcctctctccttagaacatcaacatgcctacagataaaaatacctgaatagctggaccactgggataagagtgagtctgggagttggatagctttcttgcttggcctggcaaggaagctgaggtggctstcactcttccccttgttaagacatcagtgcatctaattgagagctccctcagccaccttcatcaaggctggtacctctstccaccattggatattacatttaccacctgctttagctacaacaggttcctacccagggataccactcctatcctgaagcctgaaccatcaactcagtaaataaaatactggggagaaattaaattaaaaagtgcacaccacaggggaatgaggtaagcttcaagagacctctgccattacaattccataggagatagcaaacttgccaacacactgagtacatgactattacaaccacatctgaggaagccatcatagaaagactctccacaaccaaggaattcatagagtcttcactcccaaaagcacaaataaccaaattaagctataataaacattaaactcacattcttaagggggaaagaagaaattaaaaatgctgtcaaataaaaaataaagaacaattagaagaaatagtatacccaaatgagaaggaaccagaaaagtaattctggtaatatgacaaaacagtgttctttaacacccccaaaaaagatcacacggtctctccagcagtggatccaaaccaagatgtaatctttgaaataccagataaagaatttagaagattattacactactcaaggagataccacagaaaggtgaaaaccaacataatttttttaaaattcaggatatgaatgaaaaattttctagagagatataaagaaaaatcaatcagaactctggaaatgaaagacatgcttagggaactataaaatgccatggaaaggttcaacaatagactacaacatgtagacaaaagaattttagagctcaaagataggcktttgattaatccaataagacaaagataaaaaggaatcaaaagaaatgaagaaagtctttaagaaatatgggattatgtaaaacatccaaacctaagaataattggtgttcctgaggaagaagagaaggctagaagtttgcaaaacttatttgagggaataattgaggaaaacatccctggccttgctagagatttagatatccaaatacaagaagctcaaagaactcctcggaaatttcattatgaaaagatcatcaccgaagcacacagttgtcaggtatctaaaatcaactagaaggaaagaattctaagagctgtgagacaaaagcatcaaataatctgtaagagaaaacctatccgactaacagcagacttctcagcagaaaccttataagctagaagggaaatggggtcctatctttagcctccttaaacagaataactgttagtcaagaattttgtatccagcaaaatgaataaatccagtaaaactaaaacctttcataaacgaaagagaaatgaagtcattttcagagaaacacatgctcagggaatttgctactaccaaaccagcactataggaaatgctaaaagaagttctaaatcctgaaacaaaagttcaacatgcactaaaatagaacttcttaaaagcaaaaaataaaaaataaaaaactcacagagcctgtraaactaacacaacaacaacagtttatctaggtaacaactaatattgatgaatagaacattaccccatatctctattaacattgaatgtaaatggcctaaatgctccaattaaaagatatagaatggcagaatgaatttaaaaatcacaatccaaatatctgctttcttcaggagacttaactaacatataagaattcacataaattcaaggtaaagggatggaaaagataagctacacaaatgaaaaccaaagcaagcaggcgtagctattcttatatcagacaaaacagactttaaggcatcagcagtgaaaaaagacaaggtcattatataatgataaaaggatcaatccaacaagaagatactataatactaaatttatatgcacctaacactggagctctcatatttataaaacagttactactagacccaacaaataaaatagcaacacaataatagtggtggacttaagtactccactgacagcactaaatagattgagacagaaagccaacaaacagtggacttaagctataccctaaaacaaatggacttagcagaagtttacagaacattctgcccaacaactgcagaatatacattcttcttagcacatggaacattctccaacataggccacaaaacaagtctcaataaatttaagaaagtcgagatcatatcaagtatcttctcagacaacagtggaataaaattagaaatcagctcccaaaggaactgtaaacactatacaaatacatggaaattaaataatctgctcctgaatgatttggggattaataatgaaatcaagatggaaattcaaagattctttgaaatgaatggtaatagtgacacaagttatcaaaacctctggaatacaacaaaagcagtgctaagaggaaaagtcatagcatcaaatgcctacatcagaaagtctgaaagagcacaaatagacaacctcaaggaactagagaaacaggaacaaactaaacccaaagccattgaaagaaaagaaatmacaaagatcagagcagaactaaatgaaattgaaacaaacaaaaaagaacaatgaaacaagaagctggttctttgaaaagataaacaaaattgatagatcattagtgagaytaaccaaaaagagagaaaatccaaataagctcaattcgaaatgaaaccggagacatcacaaacaatactgcagaaatacaaaagatcattcgagaccactatgaacacctttacatgtacgaactattagcatagtactggaagtcctagccagagcaattaggcaagcaaaagaaataaaggacataacaaagtggaaaagaggaagtcaaactagtgctgttcaccagtgatatgaccatctacctagaaaaccctaaagacttatccaaaaaaatcctagttctgataaactaattcaataaagtctcaggctacaaagtcactgcacacaaatcagtagcactgctatacacgaaggatgaccaagctaagacacaaatcaagaagtcaatcccttttataacagctgcaaagaaaagaaaatacctgggcatatacctaaccaaggaggtaaaagatccctacaaggaaaactgctgaaagaaatcatcatagatgacacaaatgaaaacacatgctgtggaaataatcaatattgtgaaaatgaccatactgcccaatgcaacctacagattcaatgcaattcccatccaaataccctatcatttttcacagaactaggaaaaacaatcctaaaattcatatggaaccaaaaaaagagcctgaatagctaaagcaatcctaaacaaaaagaacaaatctggaagcatcacatcactagatttcaaattctactacaaggctatagttagcaaaacagtgtgatgcttgtataaaaataggcatgtagaccaatggaacagcagggagaacacagaaatgaagccaaatacttacagccaactgttgtttgacaaagcattaaaaaacataaactggggaaaggtcaccctattcaataaatgatgctgggaaaacttgcaagccacatatagaagaatgaaaccacatccccatttctcaccttatacaaaaattaactcaagatggctcaaagacttaaatctgtaaccataaacattttagacaataacactggaaaaactcttctggacattggcgtaggcaaagaattcatgaccaagactccaaaagcaaatggaacaaaaataagtaaatgggacctaattaaaaagcttctgcatggcaaaagaaataatcatcagactaaacctacaacccacagaatgggagaaaatatttgtgaactatgcatctaacaaaggactagtatccagaatctacaaaaaactcaaattagcaagaaaaaaataatcccatcaaacgtgggcaaaggacatgaatagaaatttgtcaaaagaagaygcacaaatggccaacaaacatgaaaaaatgcccaacattactattcagcagggaaatacaagttaaaaccacaatgagataccaccttactcctgcaagaatggccatgaagaaaaagtcagaaatgagtagatgttggcatggatgtggtgaaaagggaacacttttaccctactgttgggactgtatattagtgcagcctctatggaaaacagtatggagactctttaaagaactaaaagtagatctaccattcaatacagaaatcccgctgctaggtatctccccaccggaaaagaagttattgtatgagaaagacacatgcacacacgtttgtagcagcacatttcacaattgcaaagaaccaacttaaatgccttaaccaatgagtagataaagaaaacatggtatatatatcccctggactaaaaggaatgaaaatactagtaaggaacaaaataatgtattttatagcaactgggtggccattattctaagtgaagtaattccggaatggaaagtcaaataccgtatgttctcatttataagtgagagctaaactgtgaggacacaaagatgtacagtgatataatggactttggggacttgaggcagaaggagggaaaagggagtgagggataaaagactgcatattagatacaatgtacactactcaggtgacgggtacactaaaatctgagaattcaccgctatggaattcatccaagtaaccgaaaaccacttgcaccccaaaagctattgaaataaaaattttaaaaaagaataaacttcacttggtcatgacctattattcttatatgtgctggtagtcttgtctctaatgtctaaatatttttgcctcaatattcatagatgaaaactgtagagctcttttgtgcaattttttcaggttttaatatttatttttctattgttaccaaagttaccaccacttcataaaaagaattaggagctttgtattccttttttgtgctctggaacagtttacatagcagtgggacatggggctttttaggggagtagactgctttgtctgcttcttctgtggaaattaatctgttcaggctttatatagcttctggagtcagttttggcaaattatgttttccaagaaaaagatttatattggatatattctatagtgtcataaaaagtatcccctttaaaaaaaagtctttgtttcttgtttattttatttatttwttttttgagacagtttcactctgtcacacaggctggaatacagtggtgcagtctcagctcaaactctgcctccgaggttcaagtgattcttgtgcctcagccttcygactaggtgagattataagtgtgtgccaccatgcctggctaatttttgtatttttagtagagatgaggttttgccatgtrggtcaagctggtcttaaactcctggcctcaagtgatctgcccaccttggcctcccaaagtgctgggattacaggcatgggccaccacatccggcctatttcgttccttattttgtacattcatgctttctcttatttttctcctgtttttctacattgtgttagctcagttttagttgattctacccstttgacctaagagttgtataatgaagactgatgttttcctatgtgaaagagcctttatgttttctgattttgttatttctattgttattgtattgagatcaaataatattgtctgtattatttcttccttttacaatctattgttgttttctttgtggcctaataccagtttttatgaatgtttcatgagttcttaaagagaagatgcattctctttaccgaagtatagatacatacatacatatatacatatatactattacatacmtacatatgtatacatgtatatgtgtgtgtgtgtatatataaggtctattttattcattatgcttttagggcttccataagcttatttattttggtggtgagcagtgactaaatcaaagatagatgtaaggataacaatggtatataaataaatgttagacagtctaataaggcaggaataatacaacaacaaaaaatagaaagggagaaaaagtagaagaataaacttgcttactactctatttgtaataactggcagtcaagtgatgttgaaagttgacaaatgtaatagaagcttaaacatattcaagagtataataaagggaaacaccaagaaaggtaatatattatcaatatttaaaaactttttagctcatcttggaatcttaagttataattgtcatctactttgtgtgattttggggtaagttttcattaactgtatgaatgttagcctattttttatttctcatagtattttgaatgaatttttgaatgaaagagtttcctagacttggagcacaggaggatcctagggaaggtaatatataatgggtcatggttgtttcagctttgtagtttagtgttttctctactgctgctgtgggaaaggcctagaggtaactcttccatgtgtccgcagctctggctctcaagtcctagcctggttgagaaaggcttcttcctgcaggtctctgtttcataaatccctcctcttgccatcccaggtgacgccactatagctggtattttgtgagatcttccccctctgtacccrcagcctgagccttgattagctttctctctctgcctccccagtaatcagtcctgccctgttcaagctacatcacactcacaggcacttcctctcagtaacaggctcttgctcttctggaagatgctagagacttctcagcacctgtcagaccacctttcccttaacatgtttctcttccatagtacctttgcaacttcccatccagttctgctgtacaactctgttttcagcagtacttaaccacaattttgagtttgcaggttttctgtttcttagttttgctgaaatgttgtttgtggattttgttttgttttcttcttgttgttatatattattaacaacaagaaagagggacaattcacaaataagctgccgccatgttgttctggaaacagatgtcaatgcaaagattttcttttcttttttgagacagggtctcacactgcctcccaggcttgcatgtagtgcatagtcatggctcattgcatcctcgatctcctgggctcaagcaattttccagcctcagcctcctgagtagctgggactacaggcgtgcaccattgctcccagctaatttattattgttgttttcagtagagacgagggctcactgcattgcccggggctgttctggaactccctggctcaagccatcctcccgccttggcctcccaaaacgttgggataataggcatgagtgcctggccagggtatttttggtgctatgcatttttctcccaggttctgattctgataaatactagacttttattataatttttataatatagtttggatttaattttttatttggttcaaagagaagttgttgttttcattttaatttcctatagtagtgggttttctcctaattttggtatcaatttctagtttaatttcatgatgggcaatgaatgtcatctgtaatattgctccctcttagaatttaagtttttcatcatggcttttttctttaatgaagcttctaatgttataatctttgctattttttagaatttgcttttagaatttttagaatttttttgaatttgcttttgcatgtcttcagccttttattttcaacattcgtaagttttaggtatatattttttatacttacattgtggtttttttccttccaatgtttttgtgttttagagacaggctgccactctgttgcccaagctggaatgcagtggcaatcatagctcactgcagcctcaaactcctgggctcaagcaatcctgccactcagcctcccaagtatctgggaccacaggcatgtgccaccatgcccagctaattttgtttctcctgtagggacagggtcttgctatgttgtccaggctggtctccaactcctggcctgaagcaatctgcctaccttagccccgcaaagtgctgggattacaggcctgaggcactgcacgtgatctttccttttaatctgagtataaatttttctaacttttgagttgttacccttatacttactgattataccagaatgtttatgatcttatgttacactttgattttttgtttttattaatctttactgaggtataagattcaccaattttaagcttacagtttagtgacttttttttgagacaaagtcttgctttgctatccaggctggaatgcaatggtgtgatctcagctcactgcaacctccacctcccgggttcaagcgattcttgtgtctcagcttctcaaagtagctaggattacaagcatgtgccaacatgcctggataatttttgtatttttagtagagagggggtttcgccatgttggccaggctggtcttgaactcctgacctcaagtgatccacctgcctcggcctcccaaagtgctgggattacaggcatgagccactgtgcccagcccagtttagtgactttttactaatatatacagtcatgtaaccaccatcacaatcaagatgtagaacattttccttacctcatgcagctctgcaattcacctttgtggcagaaccttcctttccacacccaactcttacaatcactaagctgctttctgttgtaacagttgtgcctttcctccagtgccatacattgaataagtatatattcttttgtttgaattcacaaaattgaaaccaaagacttatcatgttgttgaatatatcagtagattattcctttttattcttgaatgctattccattgtatagatatactattctatgcttatcctttctatttgatgaacctttgggttatttccagtttggggctattattagtcttagtctggaccatatgttttcatttctcttctgtaaatacctagtagtatgggggtgttgggtcatatggaaagcttgtatttaacctaagaggctgagaagctgttttccaaagtggttgtaacattctaactaacaacatatgagagttccaattgctgtacttcctcactaacatttgatatcactctcttaatttaatggatgcatagtgatatattgttgtagtttcagtttacatttccctacagactaattataatattagttcgttcttacactgccattaagaaatacctgagactgggtaatttataaagaaaagaggtttaattggctcatgtggttccacaggctctacaagaagcatggcagcatctgcttctggggaagcctcaaggagcttttattcatggtggaaggcaaagcaggagcaggtgtcttacattggaggaacaggaccacgagagagaaggggaaggtgccacacacttttaaacaaccagatctcacactaactcactcactatcacaagaagagcaccgagggaatgctgctaacccattcatgaggactctgcccccgtggtccagttacctcctaccagggaattataccctcccacctccaacactggggatgagatttggtgaggacacagatccaaaccatatcgttgtgcttattggccatctgtatattataagtttttttgcaaagtgcctattcaagatttttgctcttttttaagttttggattttgaatttctttggaaaacaaaaaagcccactgagattttgattgcaactcttgttttaaatcagtttggtgaagattaatgtgttgattatgttgagcttccaattcataaatacgatatgtttcttgatttattttggtctttaattactcctagcagagttttagtttgcagtgtacatattttactaagaattttataactgaatgctaatataaatggtatttttaaatttcttgttggttgctaatacatagaaatacaattaatttttgtatattggacttatgtcctgtggctttgctatactcacttattagttctagtagagttcttaggaattttttcataatgggtcctgttatagttgtagagttcacaggattgtcttcacagtggatcatatcttcagcaaataaaaatagttttactttttcctttccagtcttcatagtaatgtgttttatttatttttcttgttgtgctggactggcaagggcctctgggttgagaacagatacccttccatgcctgtttttcatcttagtgagaaggcatttagttttagaccattatggatgatgttagctttgggtcttcatagatgtcctttatcaggctgtaaaagtttccttttattcctagtttactgggagttttaatcataaattgatacttgagtatgtcaaatgctttttcaatatctgttgagatgatcatatggcttttctcttgtagttaatatataaattatactgattgacattacagtgtttaatcaaccttgtatttctgagataaagtctacttggctatgatggaggatcctttttatatattgctggttttaatttcctgaaattttcttaaagatttttgcatctgtgttcatggagaatattgttctataattttcttaatgcctttatctggtgttaatgtcaaagtaatgcttgtctaatagaatgagttgaagtcaaaggagattgcctcagatgagactttggactttggagttttgagttaatgctggaatgagttaagactttaggagactattgggaaggcatgattgtattttataatgtgagaaggacatgagatctgaggcaaatcccttcgcctatgagcctgtaaaataaaaaacaagttagttayttccaagatacaaaggagatgtaagcattggataaacattcctcttccaaaaggaaaaaattggccaaaagaaaggggctacaggcccacacaggtccaaaacccagcagggcagtcattaaatcataaagctccgaaataatctcctttgactccatgtcccacatccargtacactgatatgaagggtgggctcccaaagccttgagcagttccacccctgtggccttgccgtgttcaacccccgaggctactctcacaggctagagttgagtgcctacagcttttccayactgaaggtgcaagctgccagtggatctactgttttgggctctggaggacagtggccctcttctcatagctctgctaggcagtaccccagtggggactctctgtggggggtacaatcccactttttcactccatacttccctagtagaggttctctctaagactctacccttgcagcaggcttctgcctagatacccagactttttttaatacattctctgaaatctagacgatggctgccaagcctcattcactcttgcactctgcatgcctacaggcttaacaccacatgccagccactgaggctaatggcttgcaccctctgaagtagcagtctgagctatatctggggctcctttagccgatgctggagccagagtggtcagaatgaggaaaacagtgtcttgaggctgtgcagggcagcaggaccctgggcctggaccatgaaaccattcttcccttctaggtctctgggcctgtaatgggaagggctgctgcaaaggtctctgaaatgcttttgaggactttttctcattgtcttggatgttagctcttggctcacttttggttatgcgaatatctctagcaagtggttgctccacagcttgcttggattcttcctttgaaaacaagcttttattttctacatggccaggctgcaaattttccacttttacaccctgcttcccttttaaaagttccaactttaaatcatttctttactcccacatctgagcatagcttgctagaaacagccaggacacatattaaatactttactgcttagaaatttcttctaccagataccctaaatcatcgctttgaagtcaaacttccacagatccctagggcacaaacagaatgcagccaagttctttgttaaagcataacatgtatgactttgctccagttcccagccagttcctcatttccatctgagagctcacttcactgtccatatcactatcagcattttggtcacgaccattaaccaatctctgagatgttccaaactttcctttatcttcctgttttcttttgagccctccaaactcttccagcctctgctattacccaattccaaagttgtgtccacgttttcaggtatctttatagcagtgtcccactccttggtaccaattttctgtattaggccattcttgcactgccataaaaaaatacctgagactgggtgatttataaagagatttatggttcatggttctcaggctgtacaagcatggtgccaacatcacttgggttctggggagatataattcacatactatacaattcaccgatcaaaatgtatagttcaatcacttttagggtattcacggagttgtgcatccatcacggcaatcagctttagaacattttcactacctcataaatgggggaggcctcagggagcttttactggtagcgaaggtgaagtgggagcaggcatatcacatggtgaaagcaggagcaagatgagagagagtaaggtgggtacagtataccacacacttttaaacaaccagatcttatgagaactcactatcacaaagacagcaccaagccatgaaggactgccaccaagagccaaaccacctcccaccaagcccccacctccagcattgggaactacaactcaattcaatatgagatatagatggggacaaaaattcaaactatacatttagcctgtaatctctcattctggagactgcattatctgatgtttatatagaccctcaagcttttgtgtttttaatgtttgcatagtgtattttttatccttttacttaaaatctgttagtatataagggtgggtttcttgcagagagcatatagttgggtctttttatccaatcttaaagactgcttgtcactgtagtatttatacaagggtgggccaatttatacaagggtgttctgtgggtaaatctgcttttatacagctcctaagaattgtttttacatttttaaatggttggaaaaaatcaaaagagtaataacttgtggtacatgaaaattatatccaaatttctagtttttctaaaatttcattggaacatagatttgctcattcattcatgtattatctgtggctattttgtgcttgcagtggcagttgcatagttttggtggagattacacagtccacaactaaaaatatttattatctgtctttttacagtaaaagtttgctaacctttcatttaaagcattacatttattgtaattatggatatgattggatttaaagaagccatttcctatttttctgtttgatttgtgctccctatgccttttttccttctttttctgccttgttttgggtttttttcttcaaattccgttttatctccagtattattttattagccatactccctttattttttaatgaagtttctctacagtttagaatatatgtctctaacacactatagtcagccttaaattatattactttgtttcatatatagtgtaggaaccttgcaaccttatacttctgttttttcctcttttctcttatgctattgttataatgcattttactattatatattattaatcccatattacattgtttctatttgcattttaaacaattatctaccgctttgttatataattcacatactttacarttcactaattcaaagtgtatagttcaatggcttttagtatattcatagagttgtgcatccatcacagcaatcaaaattagaacatattcactacctcataaagaaatcctgtcctctttagctcacgccctaatttccctatctccctgaccctgaacaactgatctataaagtactacgaatctacttctgtctccacagatttgcctagagatttcacatggataggattgtccagtgtcataattagtaactggcttatttcacttagcattatgctgttaaaatatattcctatgaatatttatatacaggttttaagtggatattatgttttcattttccttgggtttatacttagtgaaatcactgggtcatatggtaactctatgtttaaccacttgaggaactgtcagactgttttccaaaaccactggctgtattttacatttccaccagaggtatatgaggattctaatctccctacatccttgtcaatacttattatgtctttttgattaaaaatatcatagtggctgagaagtagtatctcactgtggttttgatttgcatttccctgatggcaaatgatgttcaccatcttattgtgtgcttattggcagtctgtatatcttttttagagaaatatctattgagatcctttgcccatttttgaattgtgttttctttttgttgtgtatttgtaagagttctttgtatattttacatacaagtaccttaccaggtgtaatttataaaattttttcccatctttggttgtcttttcattttcttgatgatgtcctctgtggtacaaatgtttatatttttgatactcaggtttttttgtctttccttgcttgtgtttttggtactatagctaagaaactacatttgaccctttaacaacacaggtttgaaccgcacaggtccacctatctgtagatttttttcaacaaacatattggaaaaatttttggatatttgcaacaatttgaaaaaacttgcagaagaaccatgtagcctagaaatattgaaaagactaaaaagctaggtatgtcatgaatgcataaaacatatgtagatactagtgtgttttattatttactgtataaaatatccacaagtctattattaaaagttaaaattgataaatgtatgcacacaaacacagaccatacatggcatcataggcagttgagaaatataaacaaacataaaattaactgtagtatatactatgctactgtaataatatcgtagccacctcctgttgctgttggagtgagctcaagtggtgtatctgcttaaaacactaatcatctccacatgagcagttcataccgtgtttagtgcaataccataaaacttgaataataccatgggacccaaatgaagtcatggattatcactggtgatgccggaagtgctcccaagaagcagagaagaaagccatgatattacaaaaaaaagtcgaattgcttgatatgtacaacagattgaggtcgtcacatgtggttatccatttcaagataaatgtatccagcgtaaggaccattgaaaaaagaaatgaaaattttgtgaagttgtcactgcagctgtgtcagcagcaccaaaactttataattcttgcaaaatacctatttatctcatattaaaaatgcagcttttatgtgggtgcaggattactataagaaaggcttacctgtagactaatataattcaagaaaaagaaaagtcattatgtgacaacttaaagcaaaagtaaggtgcaggatctaaaactggagaatttaatgccagcaaaggatggtttgataattttagaatgaggtttggtttttaaaagtcaagataataggagaagcagctcctgccaaccaagaggcagcagccaggcagcccagctttgctaagggtctctctcagtgtgctgaggctgcggaaaggctgcagcctgcaggcacttggcacacaccctccctgctgctaggatgccaagaggaaggtcagctccaccgaagggacagcgaaggagtagctcatgagaggagatctgcacacttgtcagctaaacctgcccctgcgaaagtggaaactaagccagaaaaggcagcagaaaagggtaaatctccagacagaacgtgcaaacaaaagggaaaggaggagcaaagggaaaatgggctgaagtggctaatcaagaaagtaaagaagatttgcctgcagaaaatggagaaacaaaaaccgtggagagttcagcctccaatgaagctagagagaaagaagccaagtctgattaatatcctataccatgtcttatcagtggttcctgtctcccttcttgtacaattcagaggaatatttttatcaactattttgtaaatgcaagttttttagtagctctagaaacattttgaagaaggaaggaatcccacctcatcccattttttaagtgtaaatgctttttttaaaaagagctaaatcattcaccagtttatttttgggtacaaccagaaaatagtgtgagatattgaattataggaggctttgactatcttaggtgtcaggttaacattccatagatggggggttagtttttatatcctataatacaaagcatactaaacagcaatatggagtcacggtcctgtactgaatgtcttaaacatcttaaattacttctgttcccttgttgttttttagtagaattgtttcctaaagaaaaccactccatattcgtggatttccctgtctgaattgtgtgcactctgtaacatatttagttgtgatagtcctgttttccaataactttgtgaatgtgctgtgaatgaaaatttgagtatgtagtgtacatgctattcagttatgaattggtaggacgtatttaacagcttatcaacatgtgaagatattggtacgtgatwgcctcttaaggaaattttgcctccggatattaagctggaaagtcactagagtaacttcacaaagaatttgcaatacatggctttttagatttttggtacatatgtgaagaattgtgtacaaattgaaatgtctgtgtgctgatcctcgacccaaccaataaaatctcaattatgaaagaaaaaaaaaagaaaatcactgaggagaaaggattatttgcctcaacaggtttttaatgaagatgaaatttccctgtttgtagaaaaaaaaatgccacaaaggacatttatttgtaaggaagagaaatgaaaaccaggatttgcaggaagagataggctatctctattattttatacaaatgcagttggtcttaagatcagtaatattcttatctataaagctgctaacccccaagccttgaagataaagataaataccagctgccagtcttttggttgtacaacagaatgtctgggcaacaagaaccctttctctgcattggttccatcaatgcttttgtccctgagatcaggaagtatgttgcctgtaagggactgccttttaaagttcttttgatattgggcaatgctctctggccacccagaactccatgagttcaacactggaggtgtctatcggcccccaaactcaacatctgtaattcagcctctagatcagggtgtcataaggacctttaagccttgttacacaaagtactctttggaaaagattgtcagtgccgtggaagagaaccctgatagaacatgaaagtctggaaggatgataatattgaaaataccatcattgttatagaaaaagccatgaaagttatcaagccccaagcaatacattcctgctggagaaaactgcccagatgttgtgcatgacttcacaggatttacgacaaagctaaccaaggaaatcatgaaagagattgtgaatacggcaaaaaaaaaaaaaaaaaaaggtgagggctgagggtttcaagatacggatttctagaagaaattaaagagctagaagacaccacaccagaagaattaacagaagatgacttgatggagatgagtgcttctgaaccagtgccagacaatgaggaagaagacatagaagcagtgccggaaaacaaattgacattagacaattggcagaagagttccaattattaaagactgcttttgctttttatgacatggatccctctatgatatggagactgaaactaaagcaaacagcagaagaaggattttagagaaataacaaaaaaattagacagaaattacaaggtatttctgtgaagttacactgagtgtgcctgcctctgctgcctccccttctacctcctccacctcttccacttctgccacctgagacagcaagaccaaactaacaactcctcttccttagcctacggaatgtgaagacaatgaggatgaagacctttctgatgacccacttgcacttaatgaatagtaaggtatattttctcttatgattttcttaacattttctctagcttcctttattgtaagaatacagtatataatacatatacaaaatatattaactgtttatgttatctctaaggcttccagtcaacagtaggctattagtaaagtttttaaagagtcaaaagttatatgtggattttcaactgtgcaggggtttagtgtccctaacccccatgttattcaggggtcaactgtattgcccaatccaattcacaaagatttccatgtatgttttcttctaagagcgctatagttttaggtcttatacttagatttttaaatctatctttaatttttaaatatgatatgaagtaggagtccaacttcattctttggcatatggctatctagttgtcccagaacaatttgttagagagactgtcatttccccattgaatggtctgaacacccttgtcagaatcatttgatcatatatgcaaggatttatttctgggctctctattcctttagtctatatgtctcttcttattccagtaccatactgttttaattactgtagctttgtagtaagttttgaaatcagtgagtccaattttttttctttttaaaattgttttggctattaaggtccctcaagatttcatatgaattttaggtttttctgtttctgcaaaaagtgtcattggggttttgatagggattgcatcagatatgtagatcactttgagtagtactgccgtctgatgttctttcttcctgacaacaaatatgtaatgtttttctaacaccaattctccaattcactggacaccaactggatctccagtaattcatttcaactctgacattaactcctggagttaaccttcagaccccacagattaagggcccagcctgcaggactgccccacttcagatatcaaccataaatctgatgcccaggctacccatattcctgcctgaccagctacatacagctccctaagctacaaagttgggttgctgaattgacatcttttttcttttttgatgttagtgtttacagctataagtttccctgatcacttttttttattgcatcccataaatttgtctgcttgtgtgtttaatgactcctgtctttgtttagccttggactttttttttttccactgtgtgttttttttttttttttaataatctctttcccccttatctctgttctctctgtccaagattctaactagttggatttttatacctcttggttcaatcctataccatttttatgtattttttcattgtggttaaaaaaatcacgtaacaagatttactgttttaaccatttttaagttcagtaatgttaagtatattcacattgttttgaaatagaactccagaactttttcatgttgcaaatctgaaactctatactcattaacagttccccttccccctctctccctgcccctggcaaacatcattctactctgtgaatttgactactctagatactttatataagtgggataatatagtatttatttttttgtgactggctgatttcactcagcataatattgtcaagatttattcatgttgtaacatgtgacagaatttccttcccttttaaaagactggataaaatcccattgtatatatatattgccacattttgtttacccattcatccatcgatggacatttggtttgctttcaccttttggctactgtgagtaatgcagctatggacatgtgtgtgtatatctctttgagaccccgctttccattattttggatatgtatgtccagaaataggattgccaaatcatatgaatatttaaggaacctctatttttcatagcagttgcattattttacactcccatcaacagtgcaaaagagttccagtttctccatatcctcaccaacacttcttattttctgggttttttttttttatagcagtcatactaatgggtctgaggtaataatttcattgtggttttgttatgcatttctctaatgattagtgatattgagcatattttcttatgtttgctgactatttgtatatcatctttgaagaaatgtatattcaagttctttgtccattttttaatcaggttatttgattttttgtttttgagttgcagggtttctttatatattgtaaatattaatggcttatcagatacatgatttgcagatattttctcttatttgctaggttacctttccattctgttgatggtgtcatttgatacacaaaggtttttaggtttaatataatcccatctatctatttttacttttgttatatttttggtgtcatatgtaagaagtcattgccatgtcagtgtcatgaagatttttccctatgtgttcctcaggagttttataatttcaggtcttatatttaggtttttaatccatttttagttaattttcatatgtcatgtaagataggagttcagctttattcttttgtgtgtagatatccagtttgcccaactccatttatgaaagagactgttattttcccactgagtattcttggcatccttatcaaagatgaattgatcatatacacaagagtttatttctgggctctctattccattgggctatttgtctttatgccgggaccatactgttttcattactgaagctttgtaatatgttataaaatcaggaaatgtgaatctgccaacttcattctttttcacaatattttcggcatcccttgtgattctgtatgaatttcaggatgagttttcctgtttctataaaaagcatcattggggtttttatagggattttgttgaatctgaatctgtagattgctttgggtagtatagacatcttaatattaaatttccagctcatgaatgtggaatgtctttccatttatttgtgtcttctttcatttctctcagcaattttttgttattttcagtatacacatgtatcacctcctagattaggtttattcctaattattttgatccttttgatgctactgtaaatagaattgtcttcttagtcctatagatcttttgtacttatattttctcttgtttatcttttcctttcatttgtgttctgaaaaaattctttgacattatcttcaatctttctattcatttattttagaggggtaatcacttcttaatttctaacagatctttcttttccctgcttgcttctttttaatttcattttgttcttgttttatggtttcgtggattttttctaatatcccctgaaataccagttagaactgttttgaatattgctttagttcttttcagttcctttttgtttaagctgtcttatgtattcatcttggcccttttttcttttgttactggtcttcctcaaaaacctggagatctttggctgtttgtatatatttaacaatgaaatgttagattgatcaatataataactggtgtgggtttcctctgccagggtttaaatgtgtttctccgagagccttccccaaatgggagggttaattactaactaacccacggtgtacaactggcaggcttccttctaggtgtatggtcatggaacagatcaaagcccatcctgtacaccaccccaaaagcccaaatgagggcgctttactcaagagcagacactcatataaaaataccccttttcggccgggcacggtgaatcacacctgtaatcccagcactttgggaggccaaggcgggtggatcacctgaggtcgggagttcgagaccagcctgaccaacatggagaaactccgtctctactaaacatacaaaattagccaggcgtggtggcgcatgcctgtaatcccagctactcaggaggctgaggcaggagaattgcttgaacccgggaggcggaggttgcggtgagctgagatcacgccattatactccaatctgggcaacaagagtgaaacttcgtctccaaaaaaataaataaataaaccaaaaacctctttccccctctctcccaccctttatttctccctctttgtctctctcaaaattgttcaattttctttcaagaatagacttccactttttatcttagaatagataccaggctatcggctgggcacagtggcttacgcctgtaatcccagcactttgggaggccaagacgggcggatcacgaggtcaggagatcgagaccatcctggctaacacggtgaaaccccgtctctactaaaaatacaaaaaaattagccgggcgtggtggcgggcgcctgtagtcccagctactcgggaggctgaggcaggagaatggtgtgaacccaggaggcggagcttgcagtgagctgagatcacaccactgcactccagcctggacgactgagtgagactccgtctcaaaaaacaaacaaacaaacaaacaaacaaacaaacaaaaaaggatagctaataccaggctgtcagtttctcttttggattcagaagaatgagagtggggtggggagctgacaggcacagattttccacggacggccctttacttgatagcctcactgtgtgactcactgtccactggcgtttgttatagcctcgtccagcctcctccatcaggaaagccaactcatcgtttcagcggtgtatcctgggatgaagttgtttcgtgcagtctatccctgtttcccatttcttgaaattcattggtaactttgccccaacaagtgtcttgtaaccacttccctcgttctcattattgtttttcctttttatatttattatctttccagtagaatttagtgaagaaatatagtctgccatcttgaattgtggaacagcatgcatttaaattgtattttatttaatttctgcctgaaaatattgagttctcagtgatttacatcagttggtatgtgacagctcagtgatgcagaagagaccattttgttctctgagagtctcatcagaattgtgcttgcatttatgtagtacttatgtctatgtcagagtgctgtgtcctcccatcttagatgacgactatatattaatatgtcctctgctttctgttgttccattacattaagggtagaatactgtattcacagtgaataatctgttagtattcttcaagacctcttatctgccaggcaggatgctagatcctaaagataacaaagataagtaaggtatgttccttgtcctcatagactcatgggagctcacattctaggtgggtagaaagaccagtagttatgagacaatataatagacatcacagtgtacaaagagctattctcgtgttgcgtaatgaagcatataggtactgaactagcaaataaaggatcctcagtcagtaccggtgcttcctcatcatatgtaagtaayatttaagatatttttatgtttaagatgccagaagctaaataaacttttctcccttatagttttgacacatgatgaactctagcactggtgtatatgagaaggaaggcgaaagcatgacaggaaayctgccgcctgctggggaaktctggagcccctgctgagacgatttggaagtctcgttaagatcagtgacatattcyttaattttaaaaaattgtaattatttaaaacagttatttaatgtattgaatgagtttaagttatataataaatgaccattgagtatttaaaacctgattgttcctttttcctgatcaccagttaaagtttgacattttgccagatagcccaggtaccggactagctggtgtttatcaaactatagccttttgtatctggttttatgtgcatccacatttccttattcacaaaatgcatttaaaattacagaaatgcatttaggctgggtgcagtggctacacctgtaatcccagcactttaggaggccaagacaggtggatcagctgagttcaggagtttgagaccaccctggccaacatggcagaaccccgtctctacgaaaaatacaaaaaattagctgggcgtgacggtgggcgcctgtaatcccagctacttgggagcctgaggcaggagaattgtttgaacccgggaggcaggggtttcagtgagccgatattgcgcccattgcactcaagcctgggcgacagagtaagactgtctcaaaaaataataacaataataatattacagaaatgcatttaaaattacagaaacctattttgtatttttccttctgagacaacaataattaataattaagcccatttattccttaactattgttttaaaatggaagtaatattgttgcatagtaatcatttatcttaaacaatgttttaatcttatgcggtatttggattttttaatgtttctaattttatgtcataaaaagcatttatgggcatgtgggatatatgtgtattctctttttaaaaggactaggtacttttatgggaactaagttgaggatgtaaccagtttgtttttctgatgtgtattaataatagatgaataatagtaaatgtttaaaaactatccaactattctaaaatcataggatcatgggactggaagagaactcagtgccatttggacctcatcctgtggagagtctgattcattaggtctaaagtaagcttggtaaatcatgattgtttaaaaagctctccagatggttctgtaattagacaagtttgagaagcatttaatagaattgggccccagccagtgtgccggcccctcttctaaggccctgcctgtaaagctgagcctcaggccatcttggaaattccaggacaacagggaactctccacctctagagacaggctggtccatctttggacagctctgtacacacagttccatcatgagccgaagctcactcctgtgagcttttcagaacaaggctaatccttctgtgtttgacagaacagcccatagagttaaaatactactcctcccatcagctccattcattcctaataagagagcgcctgcctctccctcttgcagtcatcctccctttgttacttgttcgtgtttgtctgtattaaaatggagtgcaccatttatggcctgctctggtggaactaggttattcctgtgagttcagagtatcctatagggtacactcagaggctggagcagtaaatggtcctggggcggccagcgtcatggtgctctccggctcactcttgggagtcagctgaagctggggattggtaagaggtgagactctgtaaggttctaggtcaggccagatgctccacccagctacccagaggtctgctgcggtggctggggcacaaacctcaactataagatggtactttgttttcctttgttaccagcctgtcttcacttctgtgagaatcttatagaaaggatgatcagctgggcagagacaccggattcctacttttattacctacaatggccttctccagtattctaggtcccatattttcatggagtattaagctaaaattacagaacaatgtaaacacagtcttgatggcccccctccctgtttgcatcttgtgatctgagtggccagtttacatgttacatttccaggtgagtgacaccttataccagaaaatccagatttataaataaggtatttctttacagtgagatgttttaattaaatggcttgttttaaaaatgctgttatgtcaagagctctcatgcatacaaactgctgtgccatacaaaaatgtaccctcctcagggacacattacataactgaaccataggtcttatttgctaacacttggagagaaagccattcagttccttgtcctggagatgctgaacaaatatagtccaacggctttcatggtatattcaggatcctaaattctggttctcggctgcaggccctatgtcaagttttaacaaaaatcaaatcctagaagtagtggaggtcagcggaatgtgggggaactagtttctaactatgggaagtgataaatgtcttctctttctgccttcttagaaaaagtgtcagaacagtgtatctaaactaagaatgagaagcatttgtgtttgacccacagtgatgtgtgagctttatgtagaaagtagacccagaatctgagcattaagacaatccaaagtcagcataccacctccaacacttaggtccaaaagattgtatttgggaaatgcctgtcatttggctccagttaccctcaagctcctagagaacaacatagctcctagaaggatagcatcaaatacttctaaaggcacctaaagccatgtcagcctggggttataaaatcaggcttttaatattaaacatgtagtctgacacaagtgggacctgcccacagaactgcttgttgctgtgtgccaggtcctgactccagcacctgaaaagcaaccagacaacaaattgccactgcccagaagaggctccagggacccaacagaatactttcatgggcaggaggtacgggacaagtcagatgaacacgtggatcatgtgtctcagatccatagttacagagatgaagtaaaaggtgctgatgggcccatgctcaaaccaacaagcagaagttatgacccagccattgtctcactcacttctgttacttcatagactgaaggggctccactcacttctaaagaaccagttgattggttaaaatctcacctttggtggcagagtgaggaagaggaaacatgatggtccagggctttgatggccaaaattacaggtaactttgtaagttagaggggctcggtcaggtgtgtaagcccattctagaacctctcttttttaaagtcttcaagtgttatcgtaatgtgacagctgttccccattttctatttgttaaccccatttaccaaatacaaacttctattttctgagaaattctcaggtaaagcctcttgacttagaactagtaacacctctgttgtaaagatctctgatttggaaaataatcttctcctctacagttaataattacttgaagtgaagaagtttacttcaatcatgtggatctgctcaactatgtaaagtttgtatcctacctgatgtgattttactttaaaaaggaaaggtttttattagaattgaagaaaaattattcagattttaaagatgggcttcaaaccattatttgaatatgtttaatttaaaattttcaggaaaaggagaggaggaataattatggtactacctttactgggtaagatgaatgttgaaataaatagaactaatcctgtagtagagtgtctagtctagagcatcagattgaaactactttccatacaaatgtcctgccacagacctctgccgtgtttgtcttcctcacgctggtaggtagcttttcctttgtttccccacggtctgcttccaccagaaaacgatttctaaaaagtttcatctaaataaggccagtaatatggtaggtctctctgccctgaacagattgaacaaatatttcaacaatttaacaaataatttaggtacctactgtgtgccaagctgtcctcttaaggttactagacagtataaatgacagacattaatacccaaatgaaaatgttgtgaagggcaagtgtcaagacagacctaacaagtaacattttaggatgaaacctgaagtaaaagttcgtgctagccaggcaagaaagaatagtatggaaggagttttgttcgtttgaggactgaaagaaggcccatgaggttggagcctgggtgacaaggcaagtgagtttatgaaccatgtgaagagcttttgtgatttgatcctcaagcgcagtgaagggctaacatccattcatataaatcctaaactgctcggtgaatatttttatgcctgcattgtttcctaattccttattcataacagcagtaccaactttttggacaaaagctctagatttgctaatgctgctttttttcattgttcaatgtccataatgaatttcctctcatctgaggccctgtcctacagggagagccctcccctcattccacaattgcttaatgtttatgcattcagtaggaggaatagatgctattttgtttgtacaaacattaaccatagaatgaagtctttccactgtaacttgagataacaaagccacaaacattgcaggaaacaaaatagtgcaaccggtggtatatatgaagtgacagggtatctaaaatcctaagaaaacttgacacagtgaaatgtacgtaatttgttaaaagaattatcctttttttttctttctgagatggagtctcactgttgcccaggctggagtgcagtggcacaatcttggctcactgcaacctccgccacccaggttcaagcgattctcctgcctcagcctcccaagtagctgagactacaggcgcctgccaccacgtccggctaattttttgtatttttagtagagacagggtttcatcatgttggccaggctggtcttgaactcctgacctcaggtgatccacccaacttggcctcccaaagttctgggatcacaggtgtgagccactatgcccagcccaagattcatccttttaacagatactttagagaggatttttccttcttatactggtttccctaactagttacttgtaattttgctcctaagtatgaagatgctttatctctaaagaattatccttttaacagatagtttagagaaaaagcatcttcatacttaggagcaaaactgcatgtagttagggaaaacagtgtaagaaggaaaaatcctttttaaccgtacctacaaatggcacactgtactcaaagatatacctatacaaatctcctgtaataacaaggaagtatataaataccaagaagacttaagagcagttgaaatccactcagaaatgctgcaagcagtggttactcccttatgctttttacatatgttcaattctggtttcctcagaccttggcactaatgttcccagtggcccttccaagccacggcggcccagtccctgggagtatctgtcagagggatgcttatcccagtagactgagttgatcaggaaaaacagaactgagtgaaggctggaaatgtgttcaaaataggaatgcaagctgagttatctcctgtatgcttcattagaaacagaatcctagtataaggcaataaatatgcatattaagcttttatcatagaagcaytcccaaaggatttgctcagcataaaagggtttgcagagttcagggtctctgaggtgtgacctgtaagctggcattaagattaaaatgataatttttttttaaagataatgaagcactgatttgggcctgggggtagggagggagcgggtttggtgcctgctcaatgagagctcctgaggctctgggaagaggacctggacctcccttcttcttgcagtttccctacagccctcatgcctgctccacgtgttcatgctgtttatcttcagactcaggctggctgctcatatattgctacaatatcatgacgattaagaatttggaagctttggccgggtgcagtggctcacgcctgtaatcccagcactttgggaggtcaaggcaggtggatcacgaggtcaggaattcaagaccagcctggccaagatggtgaaaccccatctctactaaaaatacaaaaaaattagccaggtgtggtggtgggcacctataatcccagctactcgggaggctgtggcagttaattgtttgaaccagggaggcagaggt

SEQ ID NO: 95438 - DNA, 27184 bp, Homo sapiens
cttaacatcagccatagtaaaataaatgcaaactgaaactacaacaagagaacatttcatatgttagaaataagagctcagagtcacaaggaaaatgagcactggaacaaaggatttctcagcaaggcaaacttacttctgcagaagggtgctgcttgtgcttctggccactgcaagagcacactgaacaaaggagggaaagagtttttatccctaacgcggttagtctctgcttctgtgtcctgtctccattggctggagtcggactgcacaatctaaactgacctgatttgctactgtttaaaactgaatacggctaattaggcaggaagggagaggctgtctgttatggtacaaggcatgtttgggcatgtcagagtgcggcaaaggcaggcagggtagtttcggctggaagaactgttttggtgggaggggcagtttacagaatgggtagccaggagtaaaagaggactctttccaaataaggaagagatgtgagttacagattgggactggtgggagaagtttacagagcaagtagcttaggagaagggacaaggaagttgatcttgagaacaaggaagtcagaaattaaacctttgaagaggaacttactgtatctgacacacaccagcagactgccaagtgcgcaccgtgttcacagcatctgtgttgctggggacatagggaagcgcgcttccatccattgatggtgcagtagaaccagtcccacctctgtggaaagcaccttgacaatagctgcttaaattctaaatgggcagaagcttcaacctagtgagaactaacctctgaatttttatcctgcccaaattcctacctaagggatctggggagtcatgccctacagatcatggattctcatcagatgggttttatttgaccctgtatattgtgacttgcttttcaatctgactctggcataatatcatgagccaaggaaaaaaatatttaacctcaaaatatatttccttgccatgccttgaaattgccctgcaaaatctcttgtgggaaaaatccatatcatataaagaatctgcttccccctttgttttccttccttcctttccagatccaggagataatcaactaagagccaggctcccttttaggtcccataagaaacattttacaacctgctctctctctgaagtctgctacctgagagattcctctgcacaataaaacttggtccccacaatcctttgtcttgacctgaacatcctttccattaatcccaggtcttcagataacctcaaccaattttcaaccagaaaatgtttaaatttgcctatagcctggaaatccctgctatgagttgtcccacctttctgaaccaaaccaatgtatttcttaaatgtatttaattgacatctcatgccttcctaaaatatataaaaccaagctctaccccgaccaccttggggacatgttctcaggacctcctgagggctgtgtcataggccatggtcactcatatttggctcagaataaatctcttcaaatattttacagtttgactcttttcatccacaccagcaaatacatttctggggatcaagtcagtgtcagccagcatgtggtcgcagagcatgtcccaggattgttgtggtggcatttcttgtaacagcaaagacggaaccatcagaatgtctgtcaataagagactggttacataacttatggtatactcatataatggaatacagtgcagctgtaaataatgagttcaatttgaatgagatgtaatggaatgatcttcaaaatatactgagagagaaattcagagtgctgaagagtgtagcacatcaccacttgtatccaaaagagaactatagacaaaactctgtgtgtctctacatgcatagaagggttatgggataaaacccaagggctgttacagtgtgtgctcctggggtggaggaggaggagagccagggccagcaaagaagtagacttggtgtgcattgcagaaccctttgtactgttcagtgttttgtttttattttgagacaacatcttgctctgtcactgaggatggagtgcagtggtttgatcatggctcactgcaacctccacctcctggcctcaagagagcctcccacctcagcttcctgagcagctgggactacaggtgtgtgctaccacacccagctaatttttctattttagtagagacacagtttctccatgttgcctagtcttgaactcctgagcccaaacaatccacccacctttgcctctcaaagtgctgggattacaggcatgagcccccacacctggcagatgctttattttgattttttttttttttttttttttaccaagtgtgctgggtagaatggtattccttaaaaacatatgcccaagtcctaacccctggtatctgtgaatgtgatcttatttggaaatcgggtctttgaggattatagttaaggtgtaaattaagatgaggtcacactgcagtagggtggcccttaatgcaacatgaagatgtcctaagaagaggaggaaagacacagatgcacacacacatacacagagagagagagagagagagagagagagagaaaatgccgtttgatgacagaggctgagaggagggacgcgtactcaagccaagggggccaagaacggccgcagcatcagatgctggagacagctcgattttggacttctagcctccagaattgtcagagaataaatttgtgttgttttaagctactcagtttaatttgttatggcagctatgcaaaactaacatgtacatatgctagtttttcttttttttttttttttgagacagggtcttgctctgttgccaggctggagtgtagtggcttgatctcagctcactgcaacctccacttcccgggttcaagcaattctcctgcctcagcctccttgagtagctaggactacaggcatgcaccaccacgcctggctaatttttgtatatttagtagagatgggtttttaccatgttggccaggatggtctccatctcttgaccttgtgatctgcccgcctcagcctcccaaagtgctgggattacaggcatgagctacggcgccaggcctccttttccaataagaaaaactattttattttcaaatgagaggggtgaaataaataaatgttcccattatgatcacgagtgaaggcagctgtctgaagatggtggaattgtgtacgattgtcatttcctttgtgtggcgaggcatctgactcataacacaaaaatgcgctatttctgtaatcagaaaaataagtacttcaaggacattctaagacagtataagaagggatttactctctgggagtgatcagatagaacctcaaagaggatgaaggaggagaaggatgctgcatttttcctctgttttatgaacgtaaacataggtcattcaaaatatctctccataagtaagaatcagtcattaggaagtaaggagacacaacaatggaaatgaaaagcaaaaggatatttagaaatatcctttaatctttctttctttcttttttttttgagatggattctcgctctgttgcccgggctggagtgcaatggcatgatcttggctcactgcaacctctgcctcctgggtttaagcgattctcctgttctcagcctcccaagtagctgggatacaggcacccaccaccatgcccggctaattttttgtatttttagtagagacaaggtttcaccatgttggccaggctggttttgaactcctgacctcagatgatctgcccaccttggcctcccaaaatgctgggattacaggcatgagccaccgcacccggcctaccctttaatttttcaaatgggacaaagtcttgtcctcataaccatgggaagaacctgtgggcagaggcatcactgtgacrcttgcatcatcaaaggtgcccagtgacgtcagcaccaacggaagactccagcgctaggagagcagtagatggcagctggtttgtgacacgacacagaccaaaagatatgcttagaagatccctgtccctgtggaacatctttggccatctctttgcatcactctaacccaaggtaaaggacttttaaagagggatctaggaaagtttggatgattgtggtaaaatcagrgtttgggtcatcctctaaccttgacctcagaaagatattgacagacaggcagctcatcaacatacagctagtagcatgcccagggatgatgtcatggaggagggcacactgctgtagagaacctggctagatgggcctgtcttaccccatccacatggcatttctagtgatcttgaacttaaaaggtggtcagtttccaattgcagaggtacaagaactgggcccaaccgaagcctgcccaggaagggattatatgaagaactgccccatagaaatataatgtgagccacattttctttctttctctcctttttttctttttttttttagatggagtcttgctctgtcacccaggctggagtgcagtggtgcgatcttggctcactgcaacctccgcctcttgggttcaagcgattctgctgcctcagcctcctgagtagctgggattacaggcgtgagccaccacacctggctaatttttgtatttttagtagagacgggggtctcaccatgttggtcctgctggtcttgaactcctgacctcgtgatcctcccccttcgacctcccaaagtgctgggattacaggtgtgagccaccacgcccagcctgtgagccacattatcaatgtccggtttcctagtagccacattacaaacagtaagaagaaacaggtgaattaattttcataatttatttctcatttaactcattctttccagactatgacacccagactgttaccgtttcacctgtgatcgatgtgaagttatgagtgagatggtaaattattttctttcgcactgtgtttgactttgagaccccatgtgttttgtacacttgcagctcacctcatttcacagcagctgcatttcacacactcgggaccacacgtggcaagtggctactctatggctatcagtgcagagctaaagcgtcatgtttgttaaatgagtgttcaaaattgaaaatcactggaaggctgaggtgggcggatcacctgaggtcagcagtttgagaccagcctggccaacatgatgaaaccccgtctccactaaaaatacaaaaattagctggatgtggtggctgaggcaggagaactgtttgaacccaggaggcggaggttgcagtgagccaagattgtgccactgcactccagcctggcagacagaatgagactccatctcaaaaaaaaaaaaaaaaaaaagtgaaaatcagagaatcagagacctgcattttgtgtggacacacagcgcagtggcgtgttccctatgggcttgtaaaccaaatcccacgtgaagcctccaacacaagctcaggcactggtgagagtccagacttccattgtaaagtctaatgcctttaatgtagacttcattctccgtttacaagatctacctttgagagcacttgtaaatttttagactggcatagtcttggaacaaattattcatcttactatcttagtgaggaagaaagaataaaaagtcgacttcgggggcagaatacattctcctagatcaagaagacttcctcatcaagacctcattctatttgcacagccctgcagtggagagatttattgcgtttctttcatgcaatcaacgcagactttgatgtgaacacggggagagacagtgcacgtgcagctgacccacggggaacagtcagccccgggcacttgaaggagaacagaggcttccctaactcaagtcgctgtctcctgccagctgaacattctagaagcaacctctaaggttggtgtccaatgcccatacattaacccattgttagatgatgacaaatatgtcattttttattgcttaaaatctaattttttctccttctttccctaggagagaatgaattctaaaagaatgctgttattggttttatttgctttttcactgatgttggttgagcgttatttcaggtaaatataaagtattgataaatcatgatctttagtgattggcagaggtggttttaatttaattaaattaattaatttaatttttgagacagggtcttactctgttgcccaggctggagtgcagtggtgccatattagctcactgcagccttgacctcccaggctcaagtgatcctcccacctcagcctcctgagtagctgggactacaggcacatgtcaccacaaacaactgatttttgaattttttttgtagagacttatgttgtccaggctggcagagataatctaaactgctgagttttgtccaaagatatcaatactactctctaaataaatcagaagttactttctctttgtgggacaaaggaaaatatacatattttaattmtttcattgttaaacattcaacaattatttacagagtgccttctaggtgccaggctgtattctaggtgctggggatgcagtgataatgaaagtgcctgtcctcagggagctttcattctatttggagaaggtagacaataaatacacataaaagacaatgccagggatataatattttataaaacaagcataataaaaaataaaggtgacaatgccattttagatgaattataaactatctcaagtttccatctttgtgtttaatataaataatactaaaggttccatctttgtgtttaatgtaaacaagactaaagtcaacctaattctatgcatatagaagcatgtgtactagaggacgcatctgtaaacctgctggtatggtttggctctttccccacccaaatctcaacttgaattgtatctcccagaattcccacgtgttgtgggagggacccgggggaggtaattgaatcatgggggctggtctttcccatgctattctcatgatagtgaatacgtctcatgagatctgatgggtttatcaggggtttccacttttccgtctttctcattttctcttgccgctgccatggaagacatgccttttgcctcctgccatgattctgaggcctccccagccatgtggaactgtaagtccaattaaacctctttttcwtcccagtcttgggtatgtctttatcagcagcgtgaaaacagactaatacacctgctaatattttcccgtctagaaaaactcaaattctagctttctccataccactcctcatggtcttmttcataagcaatgcagtgtttccagaggctatttgaacagcagtagtatcatgasagataatagtttttaaaaatgaaagctttgcacaacatgtatctggtaagggacttgtacccaaaatatgcaaagagctcttaaaattcaacaataaggaaacaaacacctaaatttaaaaattaaatattgacatttaaaacatttaaaaatgagcaaaagaactgaatagaatctcacaagagaagatatacagatgggaaataagcgaacgccaagatgctcagtctcatttgtcatcaggaaattgcaaygaaaacaaggagataccactacacacccattagaayggctaacacccaaaaatctaaaatctgaaaaccagcttctggtgaggaagtggaaggacaggaactctcattcattgctggtgggaatgcaaaatgttacaggtactgtggaagacagtgtagcagttccttagaaagctagatagagccttatcatgccacagagcaactgtgctcctaggcatgtagccaactgattaaaacacttatgtycacacaaaccctgcacaagatgtttatagaaactctattcataaatgcctcaaaccactaacatactagatgcccttcagcaggtggatgataaacaagctgtggttcatgaagtgctcaaaaccagaaacgaacaagacgactttcaataggagaaggataaacatgctgtggctcatctgtgcaacggaataacacccaacagtaaaaagaaatgagctggccgggcacggtggctcatgcctgtaatcccagcactttgggaagctgaggaaggtggatcacctgaggccgggagttcgagaccagcctgaccaacatggagaaaccccatctctactataaatacaaaattacctgggcatggtggtgcatgcctgtaatcccagctactcaggaggctgaggcagatgaatcacttgaacctgggaggcagaggttgcggtgagccgagatcacgccatcgcactccagcttgggcaacaagagtgaaactccatccccccaaaaaaaagaaaaaaaagaaatcagctatcaagctgttagaagacatggaggaaccctaaatgcatattgctgagtgcaaaaagcccatctgaaaaggctgcrtgctgtataattctcatgtgacattctggaaaaggcaaaactatattggcaggaaaaagatcagtggttgccatggggtggaggtgagggaggggatgaataggtgaagcacaaaggaattttggggggcagtgaaactgttctgtatgacagtgtaaccatggacacatgtaactttgcatttgaaaaaaaacccacaggacgttacagcacgaagagtgaaattaacatatgtaaatttaaaaaattagctaggaggttcgaggtatcctaggaagcaatgcagactgtgagaacataatctatatcccaaatgtacagaacaatcccactggaaggggtcagggaaaaagctgctgacctaaaataacttaggaatgagtggagttttttttgttttgttttgttttgagacagagtctcactctgtcaccctgactggagtgcagtagagcgatctcmactcaccacaacttctgcctccttggttcaagcgattctcctgcctcagcctccctagtagctgggactacaggcacatgccaccaggcatggctaattttttatttttagtagatatggggtttcaccatgttggccaggctggtctcaaactcctgacctcaggtgatccgcctgccacagcctcccaaaattctgggattacaggtgtgagccacagtgcccagctgggtatgagtggagtttgaaagtaaaggcaatagaaactgtacatgagcactgtacatgtatttgggtcaataaaggttttttcccacaggaatatgagttaacaattctgctgctgctatacatgtatatttgaatcaattaaataaatggatgaggcatgggggagcaagtttcttgctgttggagggaacttcatagttaagcaagagagggggccacagtgatccacgtgggaatggattgaagctggagacctcagcrtgaactcacgtttaccttactatgaacagagacatttacgtgtcaacgtgtttaaagatatgtggaaatacgcacaggttagtgtctatttccttgctctgttagctgagagggcctcggaggaaggacaccctggaagcaatgagcacacctggtacccagatcttggcttctagcaccattctccaggaaagcagcagatcgtggtttctagcaccattctccaggaaagcaacagatcttggtttctagcaccattctccaggaaagcaacagatcttgtttctagcaccattctccaggaaagcagcagaccttagtttctagcaccattctccaggaaagcaacagatcttggtttctggcaccattctccaggaaagcgaccaaggcttcttggagaagtggatggttctagattcggamaggagatttacaagatgagcccagagcatctcatagtgccaggagggatggaagggattttttttacaaattctatattgaagggagtatgtcacttaaatgggacatgggagctaactgggagagctcccgatggccmaagctgaagccttttgagcaagaaaagaaagtaacattgaattataacccaaagtatgaaacgaacttccacaagttcatactgatgtaaatgaatgattggaggagcaaaaagaaggaagaaaggaaggaagacaggttggctggatgttggaaggatagaaggaaggaagaagggagaagagacaaatctcccatwtgcagaagaattccaaatcatgtctgtagattctccactaccaacgacacagaacctgacgccccagtcctgaagtttgggttgcgcgcagcgctttcttataaagaaaacggggagaaagagcagtctttgcgtggagaagcccgaaaacagaaccctagccaggtgaacaaggtcagcatcaataggaagtcatgatggggtctgagaggcggctgcagtcaagaggatcctgtgcagacaggaggctgagtggagtgtggcgtgctgggtgggatccagacaggaggctgagtggagtgtggcatgctgggtgggatcctgaaaaaaaaagagacattaggggaaaacaagaaaatccaaccaaagtatggactctcgttaacaatacagcatcagtgttgcttcatgaattggaacaaaagtaccctactaaagctagatgttaataataggaaaaactgggttggtgcargggattccgcatactagctttagaacgtttttgtaaagctgaatcttctctaaaaataaagttgattgaaacaaaaaaggggaaataaagtaaaaataaatcatgccaaaaaaaaaaaaaaaaaaaaaaaggaaaggaaaaacaaggccaggcatggtggcttacgcctgtaattccagcactttgggaggcagaggcgggcggatcacttgaggtcaggagttggagaccagctggctgacatggcaaaatcctgtctcttctaaaaacaccagaattagcagggtatggtggtgggcacctgtaatctcagctacttgggagtctgaggcaggagaatagcttgaatctgggaggcggaggttgcagtgagctgaaatcgcaccactgcactccagcctgggagacagagtgagactctgtctcaaaaagcaaaacaaaatgaccacccccactgctttggtgccatgtattttgtgtcatttgtcctcctggaggattgtaccttaatgaaaaggatgcatggccagttataaagagtttcagatgctctgtttgaggataatgatggagtaatcttcagcagaaaggggacagggacccatacgctaatccatggcacggattctaccatctacccyggaaccacagccaggggcctggcatgtaggaggtgctcactcattatttgrtaagaaatgcataaataaatggatcttgattctagatattttgttgttgaaattgcaatgggtctttgttcaaatttaaaacttgaatgatttttttttcatttatttaaagaataaggagttattcactggttgggttgatccatttaggaaataaacatacaggatgctcagtwacatttgaatttcagggaaacagtgaatcttttttagcagaagtatgtcctatgcaatagttacactaaaaatttattcattgcttatcttaaactgaagagatgtcctgtgttttgtctagcaaactcctctatagaaaaggaatctcaggccaggtgtggtagctcatacctgtagtcccagcactttgggaggccgaggtgggcagatcacctgaagtcaggagtttgagaccagcctggccccgtgtctactaaaatacaaaaataaaaaatattaaaaaaacrttagccaggcgtggcagtgggcacctgtaatctgggctactcaggaggctgaagcaggagaattgcttaaacccgggaggtggaggttgcagtgagttgagatcataccactgcactccagcctgggagacagagcaagactgcctctcaaaataaagataaaaataaaaataaaagtagaaaagtcatctcagccggcgagaatatttgttgtctaaatattccacaaactgcaaagcaaggctggagggggtcaactgggtactaatggcaagagaggcaggggaaacggcaaaccaaagacagctctaatccctgaagacaccactgtctgcgtatgtgtaggctgatttgtatgtaatgcacgtgtatgtgtgcttgcgtgtgtgcgtgcacgtgtgtgtggtgagcttgaggatttgggggttgattacagaaaggacaggacaggccgtgcgtggtggctcacacctgtaatcccagcactctgggaggctgaggcaggtggatcatttgagatcaggagttggagaccatcctggccaacattgtgaaaccacatctctactaaaaacacaaaaaatagctgggtgtggtggcgtgtgcctgtaatcccagctactgggggtgctgaggcaggagaatcacttgaacccaagaggtggaggttgcggtgagctgagattgcgccactgcactccagactgggctacagagcaagactctgtctcgaaaaaaaaaaaaaaaaaatctctgtcgagggtgatttttttctttaggttacaataaccctcttcagccaaggatgttctctgctctggtcattctgcagggccccagaaattaataagaccagcacggtcaaagaatggggactttttattaagttcccccttttcgtttcatgtttttgatgaagtctggcatggacagtttggattttgatgaatctacgcctggggaatccaatcatggaatgtctgtggctaaggatactcatgataatgccagaaagggggacggacagtcttgaagtcatttctttcacttaaaaatatcccagggttactatcctaggcaacgcagggagaccctgtctctacaaataatttaaaagttagccgggtgtgrtggcacacccctgtggtcccagctacctgggaggctgaggtgggaggattgcttgagctcaggaggttgaggctgcagtgaattgtgatgatgccactgcactccagcctgggcagcagagtgagagcctgtctcaaaaaaaaaaaaattgctcccagggttatgaaacagaggttgcctaataagcttgctaatttaataattagcttaaaagcacaattacactctagaagaacgcagtgttgaaatgcaaagggaggtagcttgtgcctgtggtcccagatactttggaggttgaggtgggaggatggcttgagctcaggggtttgaggctgcagtgagctatgatcatgcaagtgagaacgcatctcttaaaataaataaataaaataaatgcaaacagaatcaaagatgaacttctggatgcctcctccccacctctttacaacatagagcagaaccactaatgtttggtaaataaattaattgaatctatgtttttgtctgaatatacattctcttagctgatctgttcatctccttttattaaaaaaatcttcctcccaacactcatactctttcctgatattctgcttttggccatgacctcctttccctacatctctttcctagactagctcatacccttccccacccagctgagatatctcttctctgggaggcttcccctgactctgatttgggttgatgcatgttgacraaacaccaaayggggcctgcctatcacaggctcaataaacattgaacaggctccttgcaatcacttgattttctctttkkatccaggaatcaccaagtagaagaacttcggctctcagactggtttcatcctaggtaagaacaaaaatgcctgtttacatgcacacacaaacaatatacttcaattggaagtaacaggtttttcttccccagtcaccaaattcagctctcctgggacgtttccagaattggagttttattttcgaggctcttataaacaaaccagggtctgttgatcaagaaccaggcgatgattgtggtcatgaagaagcagaygctctctacctggcttagctttcctggtttatgcagtgcgagaaagtctcttcggaaccagcttgaatatgccactgatgacgctgcttgactttggtggcagcactcaggggcagcctcatcctttgtaaagtgtatgtggtttcaactttgtgttgtgttcctatgtagctttggggttatttacagtttgggggctaytgcaggcaaagttctggtgactaaatgtaacccgtctttttttttttttacacagatatatgacttcckgtgtgagacacatttctaaaatgaagttattaggccaaagaatgcagacatttaaaatttttgatgtaaattttaaattgctaaatttacttttaataatggtaccattttatcttcttgtctacagtgcataaactaaagtattaccagctttttcatgtttggcagagctgctagttaaggcatctcaattcaatttgcatgtctgtaattgtttaagtatcttttttttttttttgtagagacagagttttgctcttgttgcccaggctggagtgcaatggtgtgatcttagttcactgcaacctctgcctcctgggtcaagtgattctcctgcctcagcctcccgtgtagctgggattacaggtgcctgccagcacayctggctaatttttgtatttttagtagagacagggtttcatcatgttggccaggctggtcttgaactcctgaccacaggtgatccacctgcctcggcctcccgagtatctttttatatgtttactattcattcatatttcatcttttgtgtagtcttcttttttttttttttctgagacagagtctcactctgttgcccaggctggggtacatggcgtgatctcggctcactgcaagctctgcctgctgggttcacacgattctcctgcctcagcctcccaagtagctgggactacaggcgcctgccaccacgcctggctaatttttttgtatttttagtagagacagggtttcaccgtattagccaggatggtctcgatctcctgacctcgtgatccaccctccttagcctcccaaagtgctgggattacaggtgtgagccaccacgcctggccaaaattacatgacatatagaaaataaaatgtcgagttttattacattttgtaaatgggtaaaactctccaattaaaaaaggcagagattgttagaatgtataaaaacatatttatatgccatctacaagagacattttagattcaaagatgcaaattggtttaactaaaagaattgaaaagtgtataccatacaaacagcaaccaaaagagacccaaagtggctctatacaaatatcagacaaaatagacaaagacaaaaattgttactagagaaaaaaaatggggcattttataatgacaaaaggatcaatccatcaataagatacatcaaatatataaacatttgcatctaataacagtcctaaaacatatgaagcaaaaactgacagaattgaagggagaaattgacaattcaacaagaatagctggagacttcagtacttcactttcaataagagacagaacaactaatcaacaagcaaatagaaggcttaaaaatactacaaacgaggcctcacaaacatctatagaaccacctaacaagagaagaatactctcaagtgcacatgagacattctccaggataagccatatgttgcacaataaaatctcagcaaattcaaatgattgaaatcatacaaagtatgttatttgatcatttttttctaaattmtaaaattaaaaatcaataacagaaagtaatttgggtaatttatagatgtgtggaaatttaacagttcactcctaaataatcaaaaaagaatcacaagggaaattaaaaaattttaaggtgattgaaaataaaaacactacatgccaaacttatgggatkcagcaaaaacagtgcttactgagaaatttatagctataaatgcctacattaaaatgaaagatctcaagtcaataacgtcctaatttttgaatttttttgtagagatgaggtcttgctgtgctgaccaggctggtcttaaactttatacastaaggaaaatttatacattaagaaaatcagaaaagaagaacaaaataaaactaaagcaagcacaggaaaaaamgaagagcaaatcaattaaatagaaaatagaagaataatagagaaaatgaacaaaaccaaaattggttttttgaaaagataaacaaatttgccaaaagtgtaacttgattgtcctagctaaaaagggagaactgaaattactagaatcaggagtgaaagaggggacatgaccaccaacttccagaaataataaggattataagtgaatactgtgattaattgtatgccaacaaattaaataacctatatgaaatgaagaaattcctagaaagactaaagaagaaagggaaaatttgaatagagctataataagtaaatacattgaattagtaataaaaaactttctacaaagaaaagcctagaaatacaaaatgtcattggtaaactatgtcaaatgctaaagaagaattaatatcaatctttcacaaactcttcaaagtattaaaagaggagtgtttttcaactcattctagaccagtattaccctgatatcaaaaccagacaaaggtatcacaagaaaactacagaccaatatcccatatgaatataaatgcagaacttttcagcaaaatactattatagaaaactgaatccagcaacatataaaaaaggattatacaccataaactacatagtgggatttattccaggaatgcaaggttggttcaatgtatgaaaatcaattaatgtaatacactgtattaatagaatacagaatataaaaaccacaggatcatctcaatagatgcagaaaaagcgtttgacaaaattcgacacttaaaaaaatataaatacccaacaaactagaaatggaagggaacttcctcaacctgatgagtcaaaagtacaacaacaataaaaaataggtaaagtggacttcatcaaaactaaaaactttcatgaatcaaaggacattatcaagaaaatgaaaagacaacccacagaatgggaaaaacatttgcaattcatatatctgataagggcctaatatccagaatatataaataattcttatcattaaacaacaaaatgacaaatagtaatttaaaatgggcaaaggatctgaatagccatttctccaaagaagatatactaatggccaataagcacatgaaaagatgcccaactttattagtcttcagggaaatgcaaattaaggtcacaatgagatagcacttcactctctatgatgtataaagatgtataaagtaggatggctggaataaaaaagataacaaaaaagtgttggtgaggatgtggagaaatttgaaatttcatatacttttggtgggaatgtaaaatggtgcagcctttatggaagacagtttgtcagttcctcaaaaagttaaccatagaattaccatatgacccaacaattctacctctagatatatacccaagagaattaaaaacctatcttcacacaaaaactcacatatgaattttaatagtagtatttgtaatagccagaaagtgtaaataactcaaatgttcatcaactaatgaacatataaacaaaatgtggtctagccatccaatggaatattattcagcyatatttccagaacaggcaaatctayagagacagaaagtagatgagttgttgcagggattgcagggagaagggaatggggagtgactgcttttgggtagtgatatatcaaagtatttcattttctttggagaaactgtaaatagcatgtgttttaaatattactttctgcatgttcattgttcatagtaatgagattaayttttaatgtgctgatcttgtatcctgaaactttgctgagttcacttgttagttctaggagatattggttttttttttagattccttaggattttctatgtagacaattatgtaatctgcaaatagggacggtgttgtttttttccttcccaatctgctggcttttatttcattttcttgccttattgcagtggctagaactgccatcactatgttggtactgccacgttcctcattgtagggagaaagcattcagtctttcactatgaagtgtgtgcgctgtaggatatttgtagatgttctttgtcaagttgaggggattcccctctattacyttttttctgggagcttttatcatgaatggacattgaactttgtagggtgctttttccragttgagcatgtgattgatcttctctagctttcaatatggtggtttacattcattgattttcagatgttgaatagcctatcttaaatcctgctgttgttttgttgtattgaaggcaaatcggatggctcgctccggttttggactcatctctcatttctgctggattgcactggtgggcctaaagcatgagggagaagctgaaaaaaagggcatccccagaaacttgtaggaaaaggggagagagaaaaagaaagcagagaaggagggaaaaataaaggcattgtgtaagggaggtgatctcctgcctcccatcctggcttcagcgaatgattggagagtgttctgactcccggctgcctaattttgagctgtagtcagagcttggaaaaggcagctcctgggctcaaaggcagtggctgggggaggaacgcacaaacccaggagccaggtgggctggatgtggcatcyccacgtgttaactgcagtgtcaggcaacttactcaaccgtgtgtgcctctgcttccccacgtggagatcaggggtggtggcactcattgcatagggygttgcaaggatgaatccagtgggatratgcactcaaacacggagctgggcgcgcactaggtgctctctaagcattaggcattactgctyggcacctgctgcsggcgcctcagtaaagcactccctgtttaacttggttcttgttccacagaaaacgccctgatgttataacgaaaacagactggctcgctccygtcctatgggaagggactttcgacaggcgggtcctggaaaaacattacagaaggcggaatatcactgtgggcctggccgtctttgctactggcaggtaggtgccactcacctttgcccttttttattttgggaaaatgtggatcagcattcacgagsctttaacctccaaagagccaaccataattaagcataattagtgataacaatagccacgatttctggggagaaacaaacttacctgtccaaacccaaataagggactcaaagacctggagaacagtgaaagtgagacttttagtgacagtcttgcaagatcggatgtctgatgggcaggcacacccagcacagtttcaactgcaatttatcccctagtgcacaggtccctccctcagttcctcataggctgagtacttggggtcacaatcttcccagacgtcgcctatttgttgttgggcaggggctttaggtgttttctttagggtggtcttgctgcattttgttgcagcccacaatgcattgcaatcctagtgagctcaggggctcttcaagtatctgacttatgacctaagtagctgagcaggctgataagaacagacaaagtgagctattttgcagactagtaaagttttatcttagactaaacttttttggtttgggtgagggcaactaaggcaggaggccgacaagcaggcattggctatttaagtggggacctagtatatcctgtttcttttgtagtttgctgacctgagccgatttaaggccctttgtcttggagatggtctactatagacacgatttccttcaatttctggctgtcctgtacaaaaggtgtgctgggtttctctgtcgatggccgagtccttaacaccagtgggaaccttttgactcatacccatttagctcctgctccctttcttcacaacagccattccaaaacatggtggcttttctcaggccctccaggtcaggacattccttcccactcaccaactcagctgaagctgtgggcccgactcctccacgcttgtacatcccgagttccttagcatcagacacacccatgtgagtgcattcagccgcctcttctcctgatcatgtttagaaaagtaagtgtcggccgggcacagtggcttatgcctgtaatcccagcactttaggacgcygaggtgggtgggatcacctgaggtcaggagttcgagaccagcctggccaacatggtgaaataccatctctactgaaaatacaaaaaaaaaaaaaaaaaaattacctgggcgtggtggcaggtgcctgtagtcccagctacytgggaggctgaggcaggagaattgcttggacccaggaggtggaggttgcagtgagccgagatcacgccactgcactccagcctgggcatcagagggagactccatctcaaaaaaaaaaaaaaaaaaaaaagaaagaaaagaaaaaagagaaaagtaagtttcttccccastgtgtgtttcctaggtttgcagaggagtacctgaggccgttcctacactccgcaaataagcacttcatgacaggctaccgagtgatcttctacatcatggtggacgccttcttcaagctgcctgacatagagcccagtcctcttcgaacgttcaaagcatttaaagtgggcaccgagaggtggtggctcgatggccccctggtgcatgtgaagagcctgggtgaacacatcgccagtcacatccaggacgaggtggacttcctcttcagcatggctgccaaccaggtcttccagaatgagttcggggtggagaccctgggcccgttggtggcccagctccrcgcctggtggtatttcagaaacaccaagaacttcccttatgagaggaggccgacctcagcarcttgcatcycgtttggacagggagatttctattatggcaacttgatggttggtggcacaccccataatattttagacttcatcaaagaatatctgaacggagttattcatgacatcaaaaatggactcaatagcacytatgaaaagcaccttaacaaatatttttacctcaataaacccacctagctgttatcaccagmatacagctgggatcttgcattttctcctcctccacagatccaatacgtcaaggtcgcacatgattcccagaggaaattatgaattacgccatgaggtttatgacgaataaatgaatcacggcaatttcttataaatgagggaagtcttaagaccttccattttttagagacatacaaatttacatccttcccaaataaatgtttcttcttgccattttgagccatcttatttggctaatgtaggataaagaataaaaggataattacttaatgttaatacgcagtaatgttattatctatgtattgtagacaatgtgaaaatacatttgacatagaatgaatatttttaatggagaaagactctagttgagaaaaaacattcataaaatggaaaagtagttcacgcaaaggaaaaaataaatgccaggccactcactgagtagtcactgtgtttttccacactgggatatgtgtggcttgtggtcgacctcgcctattgtctcagtctgttcggtgtgtgattcgacacaggtgagctagaggaatccagccaaagccacgtcttactattacggtttcaaagtgagatattcagttccttttgttaaaaagctatagatattggccggttgtggtagctcatgcctgtaatcccagcactttgggaggccgaggcaggcggatcacctgaggtcaggagttcgagaccagccagccttgctgacatggtgaaaccccatctctactaaaaatacaaaaaatttgctgggtgtggtgacggatgcctgtaatcccagctactcaggaggctgagacaggagaatcgcttgaacctgggaggcggaggttgtagtgagccgagattgagccattgcactccagcctgggtggcaagagtgaaactccatctcaaaaaaaaaaaatctgtaggtattttatttttttaaaaaagatatttactgagctcagcggtaaaggtgctctgccagatgcagacagggatagaaaagagtttggaacacctgtgtccctggcagcccacactctggcagaggttgagtctgtgtgctaggagtgcgtgttcagggtgctaaaagtgacaaggaagacggtcacctgagctctgtggtggtcagggagccatcatctccaccagacgctttgtgtgtcacacagggagagtgttcctaagtccgtgggcagtggcagctatcaacagctttagtaagtgtcacggcccaccccattactatgctgaggtcctaactccgtacctcagaatgtgactgtgtctggagatagggccgttaaagaggtcattagggtaaaatgaggtcactgaggtgggccctaatcccacaggactggtgtccttattaagagctgaggacacagacacacagagggatgactgtgaggacacagggagaagaggtgtctgcaagctgaggattgaggcctcagggggagccaaccctgtaacaccttgatctggaacttgcagcctccaggactctgatgacacacgttgctgttgttggtgctgcccagcccagtcagtcgtactcttttacggtggcctgagcaaactattccagtaggtgtcccaaaaataacagcagttcaaacaccagattgcaaggagggctgaccaccgtttcctgggatggaagacggaggctgagaaaagcctccctgggttcagaattagacctggggctaccacctcagggtcccctttgtcatgtctcccagcctccccctcatgcccagttcatgccagggaccatcttaaagaacctatctgtcaaggcttagctcaccctccctcttttttgctgtcatctcctttgactaaaagaaggtgatcttttcggagactcattcttgcatctcacagagtagctctcagttttaaaaaaaatctatgaaagtttcaaaaggatgaaaatagatcttacattagccacaagccctatatatacagtattagtaattacctgggccagatctggaaagggtgggggtatactgaactaaacaaaacttttttttttcctgccaatttatggataaggctagaagacttactgagaaggcttctgaagttttatctttaaaaattacggaatcaatattaaagcattgtaaatgtcttgatttgcatggcagaacaacaggtaagcttgccaatgttgagaacttccaggtcccaaggcaagcctgcttaggagacttagaaaccaggtcatccggaaaagccaacatctgtccccaccagccagcgtgtgcctccctcatggtgggtgctaaattgatttctaaaagaagtttaattttgccaatttgatgagcaaaaataacctctctttttttttatttgactacttatgaagtcaaaccttcttttaatcagccttttgatctatgcaaatatccttttttttctatcttttgctcagtgctttttttttcttttagagacaggatctcactctgttgcccaagttggagtgcagcggtgtgataccatggctcactgcagcctcaaagtcctgagctcgagggatctgccagccttagcttcccaagtagctgcgtctataggcgcatatcacaatacccagctaatttttttttcttttttctttttattttctttttgtctggggctgctttttgttaaggttttttttttttttttttttttttttgtagagacagggtcttgctatgttgcccagactggtctcaagctatcatttggcccccagctttccacagcgatgggattacaggcatgagcygccatgcccrgcccttcaaggagttttgatttacatatgtatttacatatgtgatatgaacccttcatcacatttgctgcaaatgttaatttcagattgttctttccattttgattgtgttgatgatgattttgacgagccgagtttaaagctctcatcctttcccgtggtgttgatactgtctgtgtaggcaccccatcctcaagttatagaaaatatagaagtttcaaggtttccttttattcagacttgatcaggaatgaattttaaggtaatgtgtagggtgagatagctaatcttatttccccctttctgtcttgcccatttccctcaacactagttattgaataaataatgcttttttaggacaggccatttgtactgtctatgaagttgttgtatatattcgggttcattccttgacttgatacccagtttcattgctgttgttctgccccgagctaatgtcacatgcttctcatcattgctgttttatattagggtagaatggtagatccatctgcatgacgcttcttttaaaaatgtttccaaacttttgttccttcatgtaaattttagattcagatctgcagtttggggaaaaatcccactggaagagtaattgaattgctgaagtctatgggtgaagctgaggttatcaactctacgatgttgagagagacacagcactctcacgtcgctatttatcccggtcattttagggccccagaaaaggctattttttatggtcttacaaattccataaacctcttgttaaacgtgtgctttgtgattgtcgtttttccttgtgtttttccagctgggcttgttggtttgcaggagacccgtggggcttcgtcaccagcttcatcaccagctctgggtttcgttccattgtgtttttcccacgtgggggagaagggagagaagggggagaagggggagactgggcagacgggggagacgggggagaagagggagtagggggagaagggtgagaagggggagatgggggagacgggagagacgggggagatgggggagaagggggagtagggggaaaagggggagaagggggagacgggggagacgggggagtagggggagaagggggagtagagggggaagggggagaagggggagaaggagtagggggagaagggggagtagggggagatgggggagactgggcagacaggggagacgggggagaagggggagtagggggagaagggggagatgggggagacaggggagaagggggagacgggggagattggggagaagggggagaagggggagaagggggagaaggcctcactggaggcgttttcggggcagcctctggacatacctgtcttgggagttccagacgacaagtattgagtccctgacccaatttcctcagagcctgccctgccgatgggcagccctggctcaccgggtgcagaagtgggcgccgcccttcagaatcctgggctccgaggagtgggcgttggctggtctcacctgccacacaggtacagctgtctgtgtttacctggcagccccgctgggcttctgcagagagcagggtctggagctgggctcacttagggctcttggacctcagtggggacatatgcgtttgctcacggagcatggaggccacctctctggagggtccccagcagacccaggtgaggtgggtcacagtggaggggagctggagtctgagaacagcctccgtggggtcatgttcctgaaggacacttgagggccaccccagcagccctggggaggggggtgcatcggaggcacctgggactacagtgctccactcattgtataagttttggaggcctctggcgctgcgggcaggagctcagggggccatgtgccccctcctcaccaccctgggtgtgctccaagcccacaggccaggctggggcacactgctggcccttggctgttggttggcaggtggttggcaggacctggagacgcacagagggaagaggccttcccagcaggggaggggaccaggagagaggcagggttgggctcagctggggagcttccttgagtccctgagatgcaaaagggcttccagggggacctggggacagtccaggccacaagccaaggtgaaggaggtggaagggaggctgagggcagcagaggggtgaggggcccaggcaggaagactccagaaccgccagacctaggctcagggtgggggacatgggcctgtggagcagaaaagaaaaaggtggtgattctgaggacttcactcattcattttgaaatcaatcaatcagtaaatcaatcacatagcacaaaacagccatccctcactggcatcactgggccttctgcctccccatgttggctgtgtcctgccagggccctgtgctctgtggaaacccactccccttgggggcccacaaggccccacccactgcccctctcagccttggatctcatccctgccctcctctgcttggctcctgttccagctgcatgacccatcttccagggagccttcctccctcacctcatctcagggccacccaccctggcggcccgtgctcacacagcacggtcatgctcctcaaaccttgctctagcccccamtcccacccccatagcacttgcctctaacaaatcaggtaatgacaatgcttgctgcaatgtaacctgcactagggctggatgatgtgtctgtcttgttctaagtgaatcccaaactcccagaacaggcctggcccgtgtgcttgttgattgactgaatgatgcgttgggaggcagcagaggggagaggctggctgggcacttggctcaggaggctggagatctggatcccttccagctcctcctcctggctgtgcaacttggccttgttaccgaacgtctctgagccacatctgtagagtggagacggcattggacccatatcactgtgtcatgtggggctggtaagatccggcagcccctgaagcagccggcacaggcctggccgtaaggggagtgcggatgggctacaccctcagtggtgctggctgggaagacgaggccccagaccctcaggccctcttcccgtccggctccaggatgtggctgggggacagtgctcaccatctatgttgaagaccggggctttctgcaggtggaatttctccacgtactccaagtatcttcccagccatttggggtcctccagcattcttctcgctggaatcagaggggctgacagtgaggggctgaggcctggagcctctgtcttttctgt

SEQ ID NO: 95439 - DNA, 49269 bp, Homo sapiens
gatctttataattatctgcgcctctccccagccatgtaattcagcttcatctcgttatcatatctctttaacagttcctcaatctttctttgactccatgaccttgacacttttgaaacttacaaactagctgttttgtagaaggtcccccaatttgagtttgtctgctgtttcctcatggctaaatccagattatgtatttcagtcaggaaaccacagaattgatgttgtgtccttctcaaggcataatatgagaaagcacagataatatctgttggtctcattgatgatattgactttgacctcttatctgtcaggtttttccaccgtaaagttacctttttcccctttaataaacaatctgtgaagagatacgcttagaacatgtagacactctgttccttattaaactttcaccttcttttagctttcatgattcttgcctgagtcaattattaataaatggtttcaaaactgtggcattctactgtcaggaattttttttttttttttttttccttgagacagggtctctctcactctgtgacccaggctggagtgcagcgatgcgatctcagctcactgcaacctccgcctctcaggcccaagcgattctcgtgccttagcctccatagtagctgggactatagctgtgtgccaccatgccaggctaacttttgtgtttatagaagagatggggtttcgtcatgttggccagggtggtgttggactcctggcctcaagtgatccacccaccttggcctcccaaagtcctgggattgcaggcgttgagccactgagcccagccctccttttcttacttctgtgtttatgaactcttggtaacttattttaggggtgataaaatatgttcatccattaacatattttctgttacttattgattgattgatttttaccttaaactattaagggttaaccattaacatgttaattgctatcgttaattgtagggtgctacaataataaaatgctaattttattgccggtttttatgtgcagattgtcttagatttggccaatggaagctcctttaaggtggtttctgtgttccttttgacacatcccttactctttcgtgtttccatcatattttgcacactttcttactgactgacgcaaaaggatgtttcagggtttttttgtactttcgttgcccttgtctcagcccagccatccatcaagaggcagaagtcccaccacagaattacagcagacgctacccaagtggagacaggagggtagaaggagaggctggaaggggaagctaggatgagatgacattccaagacgtgcagcatgtttgcatgccagaaatgacatcgctgataggggtttacagaaatctcattagtaaccttccctaagtttgttcttacctacaaaaggaatctacttcacctgtactggaaagctgaaagtgcagggggccgaaggcccgtgggacatgaccaactcagcattccgctggaggctatatgatcaaacagcaaattgtttatcatgaatgcaggatgtgggcaaactcacactgccctgccaccaaaagctttgctgagggatatcactccctggcgccgggctcttttgtactctttgtactctttctctttatttctcagaccggccgacgcttagggaaaatagaaagaacctacgtggaaatattgggtgtgaattcccccgatagttatctactgagaaaattagggcctattgttcaaaggatgcagtctcgcaagcctgctgtgaaccagacggccgactgacaattactcaacaatcacccctgcttctcgctatctcttttacctaataaatacggagggctgtgtaaagctcaggacccttgtccactagacgctaggttccccctgactccttcttccaaatatactcttttgtctactgtcttttattcccgcgtttgccccctttgttcagtccaatagatccgcggcatagtggcacccccaacagcaacagaattgggctgtcaacgtgaatggaacagacaaaagtgtaggactttgacatggactgagattcaaatctcaaccctgctactgactagctatgtgrtcttgtctacgttgttttacctctcagactttcagtttcctgaggctccaaggaagatgatggtaatatttgcttctgaaactgcccctataaactttataaaattaggccgggcacggtggctcacacctgtaatcccaggactttgggaggctgaggcgggtggatcacctgaggtcaggagttcacgaccagcctgaccaatatagtgaaactctgtctctactaaaaatacaaaaattagcctggcgtggtggtgtgtgcctgtaggcccagctactcaggaggctgagacaggagaattccttgaacccgggaggtagaggttgcagtgagccaaaatcatgccactgcaccccagcctgggagacagagcaagactccatctcaaaaaatacataaaattaatcaggaaagaagggagggagggagaaacaaaaacaaaccaagctggcagcaggttcagcattcatgattaactcggcacactctcccatctgcttcctcacactttggtgcctattgttctagaatcactagacccagttacaagattatagttcaccttaactgctctttaaatagcaactcgaacattatgaaatgttgttttcactttgagatattccttcaggtcctgatatggaagaaactactgatgtcagctgaaggaccacactgatgcagctgtcctgaaggactccccgaggagctacctcatcaaaaaatacagtttccactttgcgatgattttatcccccttgccccaaccgaccagcaaccccaattttccagcccctcactctccacaatcctcttaaagccccaggccagaacttcttgggagacagatttgagggtttccttccacttccttgctgggtggcctgtgatcattaaactctttctttgctgcatccctgctgtcttagtgtaattggtctatactatgcagtgggcatgcaaacctgttgatgacccctccttgggtcatcatgaggactagaaatactggataccaagggctattctagtgcaagattgcatctcctctgtgctgtgcagagaggataatcactatctcttcaaacgcagtgtcccacatatattcaggaattcctgcaattatgagacaaatattactgtttgttgttataattatttctcaagcattatcccaccagaccaatgaaatggaagttgtagagaaaaaagtgggggacaaatctgtctgtttttgtttgtttgtttgtttgtttttgagaaagagtcttgctctgtcgcccaggctggagtgcagtggcatgatcttgcctcactgcaacctccacctcctgtattcaagtgattctccagcctcagcctcccaaggagctgggactacagacgcccgccaccatgcccagctaatttttgtagttttagtagggatggggtttcaccatgttggccaggctggtctcgaacttctgacatcaagtgatccacccgccttggcctcccaaagtgctgggattataggcatgagccaccacccctgactaagtctgtctgtttttgaagtacaaaaaaaaaatccaaaagaaatttccaccaaacagataacaatgacttttgctttttatagcgtacacatctgtatcatctgaattatttgataaaaaagcattttttaattacttgtttgttactgctttattgttttaagtgaactgttccctccacagttagatcagaactcattgaaacctaagatcagagaactgaattgagtagagttttgtcttggggtaaagcaaaggaaaatctttttccttgatcctttattccatattctaactctctgtgtgcgagtatgtaacagccgtgatttaacttaatcaccatgacttgacaagctgcagcctttgagactgactgagtcatcaagtttgggaaacagattttgtttgacctggtgcggcccaatcttatctgtatcttcaatttaaggacaagtgagtaaatatgtgagccactctgtgtttctggcacttttttctcttattcttactttgcaaagactttttatgcctgcaattttattaacacttctaatatccaaaagaaacagtgattctgtaacaagttatcttaaaagaaaaaaaaaagagagaagcagaatgcgatatgtaacccaataccgtttctataaattaaatgtatatgaccacagtgcacattatgtaagaacatggaaaaaaaaactgtatgcaaatcaaatacatcacagtagttacctatagtaggaggagaaaagcaggaaattgagtttttttggttttcttttgagacgggatctcacttagacacccagtctagagtgcagtgccacgatcgcagctcgctgcagcctccacctcccaggttaaagctatgttgcccacgcaagtcttgaatgcttggcctcaagtggtccttttgtctcagactccaaaagtgctaggattacaggcatgagccacagcacccagcctgggaatggagttttgttttatattaagttacataaattaatgagaagggagagagtgagaaagaaagaatttggcagaccagtggggataaagtgccaccaactctgattagtgtgaagaattcaactctcggcattgtgtttttagggtccatccaagttgctttatgtacatggaacccagtgcttctgatgctgtgtatatcctgtggcatgcgtccaccacgcttggtccacacactctgttatgggctgaactgtgtcttccccaatttcatgtgttaaaatccccaagtcccagtactcagaatgtaactgtatttgtagatagggcctttaaagaggtaattaaggttacatgaggccatattagtgagccctaatccatttgacagtatttgaagacaaggccttcaaagacgtgtttaagttaaacggaggctgacaagtggggctctaatccaatatggcgggtatccttacaaggagagacattgagccaggtgtggtggtgggcctgtaatcccagcttctagggaggctgaaggaggatcacctgagtccaggagttcaaggctgcaatgagctatgatgcccaccattgcactccagcctgggtgacagagcaagacctcaaaataattaaaattaaataaataaattaaagacattgaatcttcacaatgactggaagttaggcattcttcttatccccatcttgcagatggctgaactgagtgaggcaaggagaaggtaagtaagtctttgaaagctacaccactagtaagtggcaggtgcaggcttcgaacctgcagtcgtctaataccaacgacttagcttcacgttcaacccctgcctgagaccacctctccttgcagaagccaggtcaaggcctgatgtttgctagggtgtgatgggtggggtgcctcagtggcaagagtgctcactcctgcctgggggagtctggcaagggttcacagaggtgaccttgaattggctggtggaaggcgagtaggtgttcagcaggcggactggggacagacaggcagggtgtctgcaccgcagccctgggcgaaagcttgcactgcgggcaagcggcagggctgacggggagcccagggatcggagccagcaccgggggcttattagggctgcggccgccccaggccctgcctttggacccttccggcctgcttggcagatgccacggttggttcccccacggggcatatttccgccgggctccaacttaggaccccaggcggaggtccagtgtcagctggacaaagctctgttaggaattttcctatcaggagtccctaaccccctacacgcacacacacgggcgcgcgggcgcgcacgcacacacacgcacacatgcacacatacgcgcgcgcacatgcacataggcacacagagatacgcgcacacacacacacaaacgcactcagatttcccggaccctggttttcctcctgtgaccctttcggggccgggctstcaccctaaagaagcagccccgccctggggtggccccaccctctcttgggacctgtcataagtcggaccccgggcgcccggctgcgcagtcccagccgccttccccaggcagtggaaccttcgggctcctgtaagtagacctcctgctttctttccttcccttttctccctcctctaacccccttgctttcttcctgccaagtttctagacgccccagtggaggaggtttgctcttagacctcctccccttacgtcgaaatgaccgctgggtcttgcactcggaggatcttgggagccgacgtcccgacgcctcccgcccccgcagttccttggagagcttggagccgcgcgccggagggaataggaaagcttggttacaacccgggacacccggtagcttcctgcacccgggagggggctggccagggaacttgctggactgcacaactgggggagggtagaagaagaaagatcggggtggggattcgggaatgggcaagcgggcggcgggcggcgggaggcgagggtgggagcaaagggcgagcgggcaaaggccgggcgccgcgccaggccccctcctcgggcgggcgagactttcccgggacctggcccctctgcggccagaccctttccaggagggcttctggacttgtagcgagtttggaagcccagcggttgcttttttggggaaagggacaaagatgtgtgaactctaaagaagttgaactcatagaaataacgactagaatgatggttgccagaggctgggagcgggttcgggggggaatgggggcttgttggccaaagggtacgaagttcagagacgagaggagtaggttctgagatctgttgcacagcagagtgactagagccaataatgtgtatttcgaaataacagagtaaactgcaaatgtctcaccgtaaaaatgatacgtagggcctggcgcggtggctcacgcctgtaatcccagcactatggaaggtcgaggcgggcgaatcatttgagctcaggagttctagaccagtctggccaacatggggaaaccccgtctctactaaaagtacaaaaattagctgggcgtggtggcgggcgcctgtaatcccagctactcaggaggctgagacaggagaaccgcttgaacccgggagacggaggttgcagtgagctgagatcgcgccattgcacttcagcctgggcgacagagcgagactccgtcacaaaaaaagtcttaatttwaaaaaaagaaaagaaggaacaaccccgggctgcagatcagaccgcccccctggctccctcgcaatgcgggagtgctccctccaggtcaccgtgtcccctcccgcggcaccggtaggggagctggggagatcactggcagctccaaatggtttcgtaactggattgtttgtagcggatgcacccgcgggaaggcgcaggtcccaagtgattcggcagagttcagtccaagcagaacatcctgaacccccagctcggggcagccttcatcatcttcccttgctttggtgcagcgtttcagctcaaaatcggtttggtgtggagtttaaactcaaatccctactgggccaaagaaaattcgcacccgatggctgagtgcaagtggttcacacctgtaatcccagcactttgggagaccgaggcgggcggatcgcctaggcaacacagtgaggctcctctctacaagaaaagagagaaaaaaaagtatttaaaaaaaaaaaaaacgcacctgaaaatggggcggagcagcggcgccctccggtggttttcaggagttctgagactgccttgaaatgcstggctgtttccatctgaaagaggtgcatggacttctatctattgggttctttgtgtttgatgctttttcttagaattcactccatgtgagatgagaaacggaatggaatattcgcacttccggtaactgttcagtgccgtagagaaactctagcctagcagtggctgggaagaatttctttgttgttttatattttttccttgtcttgaagatttctttaaacctcagtttcctcatccgtacactggcaatgatactaatgtctatcttatagggaagttataaggataaaatgaggtaatctatatgaagtgcttagcacagcaccagaaacatagtaaatgttaaatgaatgtggttggcatgatatgataatgatgggatttgaggatattgtaattgtgctgtctggtctcagtttgacggctagagaactgttagaatgcagtcacttcatggcagttgactacatatttactgtgttctaggagcttcaggatggttcgtactaagacatggaccctgaagaagcactttgttggctatcctactaatagtgactttgagttgaagacakctgagctcccacccttaaaaaatggaggtaagtcatactaaaaatatttcagagttggaagggactgtatcagttagcttttgctgcataacaaactaccccaaagtttagtgactttaagcaacaacggtttattagttcacaattctttgggttggcaatttgggctgagttaagctgggtggttcttcttaggtctcatctggggtaaatggwtaatttaggatgggccttgctcacatgtctgctgattagcaggctttctgttggggtgcatgccttagttctcatctatgtggcctttctagcaggctagcttgagctctattcttatagtggccccatagatctagagcagcagtagttggcaagctccaatgtgcaagcactttctcttttttttttttttttttttttgagacagagtcttgctctgttgcccaggttggagtgcagtggcatgattttggctcactgcaacctctgccttctgggtccaagcgattctcttgcctcagcctcctgagtagctgggattacaggtgtgcgccaccatgcccccctaatttttgtattttttctgagatggagtcttgctctgtcacccaggctggattgcagtggagcaatctcggctcactgcaacctttgcctcccaggttcaagcaattctccctgcctcagccacctgagtagctgggattacaggcgcccaccaacacgcccggstaatttttttttttttttgtatttttagtagagatggagtttcactgtgttggccaggctggtctcgaactcctgacttcaggtgatccacctgcctcggcctcccaaagtgctgggattacaggcgtgagccacagtgcccggccttaatgtttgcatttttagtagagacggggtttcccatctttgccaggctggtcttgaactcctgaccttagatgatcagcccgccttgacctcccaaagtgctgggattaaaggtgtgagccaccatgccccgctgtgcaagcccttttcaagcctctacttgtgccacgtttgctaatatcccatggtcaaagcaaatcacaaaaccaagctcagattcgagaggcagaaaatagatttcttgatgggagaagtggcaaggagacaagcacacaagggtgggagttatttgtggccattttgcaatctgccacaaagacctttccagggttctcagtgtgaatcctcgatgtcacatggcaggattcccctgctttcattgataactgaaattcatgcttgagtgcattactcttcatggctttgaccagactatggggaggatgtcctctctatcctcataagcctgatgatggcagtgaggtaagcactgcccagtagctatacgaagagttcagactataagatgagtctcggctgggtgtggcggctcacacctgtaatcccagaactttgggaggctgaggcaggcagatcacaaggtcaggagatcgagaccatcctggctaacacagtgaaaccccatctctactaaaaatacaaaaaattagctgggtgtggtggtgagcacctgtactcccagctatttgggaggctgaggcaggagaatagcatgaacccgggaggtggagattgcagtgagccaagatcgcgccactgcactccagcctgggcgacagagcaagactccatctcaaaaaaaataaataaataaagatgagtctctaaggagtgtttacaggtaggtaagcatttgagaaaaggggacgcaatcaagtagcatgacaaagtgatcagtcccatctaagctatgatggccatgactcaaattcaaaattccaaagaatgaatacatgagagtcactccagcaaaatgcatgttctctcacaccaactggggctggcgatgaagccatatggtgagcactgtaacataatggtttaaatgtggccttgggcaagtaactaagcctaacctaaaatggaagcaatatttgttgaatatcaaatgacataattcgtgtaaagcatggaatgagtgctgagtaaatagcattaccattattattattattattaactgggctgggccaaaaatgagaaccccttcttgtctctgcgatagaagcacagatgggaagacattcctgaagcagaagtattatctgtggttttttagaataccaaaaacaggctgggcatggtggctcatgcctgtaatcccagcactttgggaggccaaggtgggcagatctcttgaggttagaagttcgagaccagcctggccaacatggtgaaaccccgtccctactaaaaatacaaaaattagctgggtgcagtggtgggcgcctgtaatcccagctactcaggaggctgaggcatgagaatcacttgaacctgggagatggaggttgcagtgttcagagatcaagccactgcactccagcctgggcaacagaacaagactaggtctcaaaaaaaaaaaaaaaaaaaaagaggccggtcgcagtggctcacgcttgtaatcccagcactttaggatgccgagacgatggatcactaggtcaggagattgagaccatcctggctaacacggtgaaacccgtctctactaaaaatacaaaaaattagctgggcgttgtgaggcaggcggctgtagtcccagctactcaggaggctgaggcaggagaatggcatgaacccaggaggcggagcttccagtgagccaagatcacgccactgcactccagcctgggtgacagagcgagactccctctcaaaaaaaaaaaaaaaaaaaraatgccaaaaacgaaggcatcaggccttgagttccgtttttttcttcaacatttatgttagttttaggggtacatatgcaggcttgttatrtgggtaaattgcatgtggctgaggtttggtgtacgaatgatcctgtcacccaggcagtgagcatggtacctcatgggtrgtttctcaacccttgtccctgtctcacccctcctgtctagtggtgctcagtgtctattgttcctctcaggccttgagtttctaattgcctatggaatgctttattttgtagaggtcctgcttgaagctttgttcctcaccgtggatccctacatgaggtattatttatttcgcccctcaaaatgctaatgctgtgttaaatgctatctggaagtagttcatcttctaaaatatccaactgacttaaaacattgtcactttccttctgtttctcccagccagtatcagtgatragattcatgcacgctcgtcttttgcaggcaaaggtctaagtagcttagtgagggatcacctcagtccctttgtcccaaccatctcctatctgctctgcacaatttgcctttcactgctcaacagaattacttccagaaaaaaaaaaaaaaagaaggaaaaaaaaaaccttaaaagaaaaaaataaagcctgggcaacatggcaaagccctgtctctactaaaaatacaaaaaaagtagccaggcctggtggcgcaggcctgtggtcccagctgctcagaagggtgaggcagaaagatcacttgagcctgggaggcagaggttgcagggaggcagaggttgcagcgagccaagatcttgccaccgcactccagcctaggtaacagagcaagaccccgtctcataaagaaaaaagaagccaaaccccaatttgtgcatttcactactggcaagtaatttggatagaggaagatgctaagactaaaatcagtttttctggccttccatttacctgtattcttttaatgtaggtgaatctgtggttgactcaaacttatatactcagcagacaactcagggaggggaggaaatcaaaagcctttattgactactaagtcctcagtatttttttgcctcggtaaataacatagccatcattcttttacatttttttcatagctgattgataaagattcaaatcttaagtggaaaatacagtttaaaaatgttaattggcatctttttgcgtagctagtgttttgggtaataactacccagtggtgcctgggttctatttttaaagtcattggtagaaattcatctttacttgaacatggcagtaagacttttgtgttcactcataaaaaaatccaatcagagtgcttatctgaggtcacagagcagaacttcctctaacagctttcctcctgtatctcacctagttgtagcccttcatctgtctgggttttattgccgcatacacttatccagcagtttttcatttggcttgaaactcaaaacagtcccccgatgctcctatgtattaagaatggaattttatttatttacctatttttttttttttttttttttttttttttgcagagtggcagccaaaagattgaaggaaggtgatacaatgatggggcagcaagtggccaagtaattatttccatttgtcccagtgcttggaaaatatgtctcctctttacctcctgctgggtcctgtctctgtccattgctcctacaatttcttcagcctatgttgttgactcactgtgtgatcttggaatcaacttgggaaattctgtctccttcctaactagctggaaaggagggaaggatgtgaaattgtcattttttcagcttcactttgccatccttacttttaattactaaaaaaaaaaaagtatttgtccaggtcatgatttattgcgggatctggccagcagcccacaatgcaacagggttctctctttgttcccaggtggatcggcaggttgagaaataatagacacacacaagatagtgaaagctgggtccaggggcgtcaccgccttctggttccgtggtgccaccaaagcactgaatatacccgcatttattattaagtttagtgagggcgggggtaggttagtgagggatttagggtcatttgattatgaggtgagatggtcacatggggatgaagtaattctttaacatacatctgtatgcagaagtacagtatacagagawaagaatttacaatatagtgtgtgcatcagtaatttctaacagagccttaaaacagaaacacagtctttccataacctatgattagcaagatattaatcagcagtaacagttgcagcaaaagctggttacaaacaatccatagaaacaggaggtgaagctagacaatcagttagaccagaaattctcagaagggagtatgccttaaccgtaaagagggctagaagagctgtggcaagatgagggcatttacagccctatcttatccatatggacaggtgcccccacatgcgtccatttataggctctccacaagggttgcattccattcccagagctatgaaaatctgcatttctggcataggaatcttggtgatgtgaaacctccctgactgcatgtctggtcataggctctctgcagggggaagcacatcacacgctgttggctcattctggcagtccaacctggcattgtctttacacaatcctgcatgcaactttgtattcacaataatcaggagcatttcatcttttattccgtagcaatagtttcagggggtctgcctacaatgattattgtaaaaattcaaataaaacaaaatttttatcttagaaactgaaagttcccctgtcatctgaaccttaaagacaactattgttaatatattattatttcaaaaattgtgggccagcagtggctcacgcctgtgatcccagcactttgggaagctgaggtgggcagttcacttgaggtcaggagttcgagaccagcctggccaacatggtgaaaccccgtctctactaaaaaaacaaaaattaactgggtgtggtagtgcatgcctgtaatcccagctactcgggaggctgaggcaggagaattgcttgaacttgggaggtggaggttgcagtgagccgattgcaccactgccctccagcctgggcgacagagtgagactccatctcaaaaaaaaaaaaaaaaaaagaaaaagaaaaattgtccagtgtacatacttttataaataaatttcattttattttattattattttttttttgagatggagtctcactcttgttgcccatgctggagtgcaatggcgtaatcttggctcaccgcaacctctacctcccaggttcaagtgattctgattctcctgcctcagcctcccaagtagctgggattacaggcatgcaccaccgcacccggctaattttgtatttttagtagagatggggtttctccatgttggttgggctagtctcgaactcccgacctcaggtgatccgcccgccttggcctctcaaagttttgggactacaggcatgagccaccgtgcccggcctatatataaattttaaatggaattatatgaccttcagaaaactgctatcaattattatgttaaggatatctttcattgacagtatatgaatataccacctaccttttaatagctgcaagttatttttaactaatctactactgataacaactgttttcaattttttctatgacaaataattcttccaggagcatgtatgtatgtatacgtgtgtatctgtgtattctttaccctcttggatgagtattgctttacattaagttcccagaagtataaattctagacccaaagaaatgtatatttttaactgaaaaggtgatgacaaattgttcttcagaaaaattacatgaaggctggacgcagtggctcatgcctgtaatcccagcattttgggaggctgaagcaggaggatcacttgaggtcaggaatttgagaccagcctggccaacatgtcaaaacccaatctctactaaaaataaaraaattagccaggtgtggtgatgggcatctgtaatcctagctattcaggaggctgaggcatgagaatygcttgaacccaggaggcagaggttgcagtgagctgagatcacacctctgcagtccagcctgggcaacagagtgagacttggtctcaaaaaaaaaaatgtatgaatgttcactccyacaaatagtattaacctgtttcccttatactgttyatcatcagtctcggcaacctgagataaatataatgatactttatgcttagtttagtttgcatttcttttattattagtgatgttgaccttctttttgtaagttaattctcaattttcttctgtggattatctgtttatatcctttgcccttttcctttaggtcttatcattcgttatattgatttgtaaaagcttctcgtatgttcaggatattagtgttgcaaatgtttgggcctttgttgatatttcttctgtgtccaattacagtttaaaattttatgtgataaaattgtaagtatttataattatggtcctttggtttcatctcatgcttagaaaggggttccccactccataattactaaaatatttattcatgccgggggcagtggctcacgcttgcaatcccagcactttgggaggccaaggtgggcggatcacttgaggtcgggagttcaaaaccagcctggacaacatggcgaaacctcatctctactaaaaatacaaaaattagctgggcacagtggtgggcgcttgtaatcccagctacttgggaagctgaggcaggagaatcatttgaaccaaggaggaggttgcagtgagcagagatcgcgccattgcactccagctttggatgatagagtgagactccatctcaaaaaaaaaaaagtattcatgttttctgtattttatactttaattttttatgacaaaaattttgagtcatttagcttttatattagaataatgagtgggggcagcttcagtggctcacgcctgtaatcctaacactttgggaggccaaggtggatggattgcttgaattcaggagttcaagaccagcctgggaaacatggcaaaaccctgtctcttaaaaaaaccaaacatctcattctttatttttttaaattttgtgtctcaatgactagccagttattataataccattggtagaaatcgtctatggatctttactggaatttcagtgaccttacagatttatttagaggaaactgacatctttacaatttctctctccaaacacaaggtatgcttctccatttattcattttgtcttatatcccattaacagttttcttcatataggtcttatacgtttcttgctaataattaaagaaatgaacatgtatttgtgtttgctggattggcaaactatttttgaaaatataatagtaatggagataatacactcatacattgatggtggaagtggaagttggcacaaccttctagaaaggaatttgggaatttggcaatatgcagcaagagttacaaatgttttaatactctttgacctagtaataccatttatagaaatcctgactaaggcaacagtattgagccaggtgcagtcgctcattcctataatcccagcacttcaggaggtcgaggtgggtggatctaggagtttgagaccaccctggacaacrtggtaaaccccgtctctacaaaaaaatacaaaaaagtctgggcacagtggctcacgcctgtaatctcagtactttgggaggctgaggtgggtggatcacctgaggtcaggagttcaagactagcctgggcaacatggtgaaacctcgtctctactaaaaatacaaaaattagccrggcgtggtggtgggcgcctgtaatcctagctattcagggggccaagggacgagaattgcttgaacctgggaggcggaggttgcagtgagctgagatctcgccattggactccagcctgggcaacagattgaaactcttgtctcaaaaaaaaaaaattggccaggcacgtggctcacgcctgtaatcccagcaatttgggaggccgaggcgggcagatcacaaggtcaggagatggagaccatcctggctaacaggtgaaaccccatctctactaaatatacaaatacatgtatatttatatctactaaaaatacaaaaaattacccgggtttggtgtggtgggcacctgtagtcccagctactcgggaggctgaggcaggacaatggtgtgaaccggggaggcggagcttgcagtgagctgagatcacgccactgtgctccagcctgggcaatagagcgagactccgtctcaaaaaaaaaaaaaaaaaattagctggatgtggtagtgtgctactgtggtcccagctactcggtcccagctactcaggaggccaaggtgggaggatcatttgagctcaggggaggttgaggttgcagtgagccatgatcgcaccactacactccagcctgagcaacagagagagactgtgtctcaaaaaaaaaaaaaagaaaaaataataatcacgtttatgaatattaattaaaatatatttcctagcaagcagactcagaaaaaaggaaaaaaataattaacattaggaaaaatactgaaagtatcctaataatgggggtgtaattaaattcattacattgtttgaaggattcttactaacatggaaaaaagtataaattatatagaccaacgtaatgttgacagataaattattggttataaaacatataacattacttcaattatgtaaatatgtataatacatccgggcgcggtgtctcacgcctgtaatcccagcactttgggaggctgaggcagacggatcacgaggtcaagagatcaagaccatcctgcccaatatggcaaaaccccgtctctactaaaaatacaaaaattagctgggcrtagtggcacgcrcctgtattcccagctatttgggaggctgaggcaggagaactgcttgaacccgggagtcagaggttgcagtatgccgagatggcaccattgcacccagccaggcaacagagcgagactctgtttcaaaaaataaataaataaatacatacatatagtatacatttttaaatataccattaagattgacagaaaatacacccaaatgttagcagttgtctttgtgctgtcagattagaactgatatttttgttttatatgtttaaaattttctagaataaatatgcattatataactttatgatctgggaaggaaagatggtaaagaaggataaagagttggatgaagaaaagggaatcagtaaatgagacagaaagggtgcagcttagaggaggaggcaaaaagccagcagagatcagtaccctgggaaccaatgagggaagacttttgggtgaccctgtgttaatagagtggaaaagggtaggctgggcgcagtggctyacacctgtaatcctagcactttgggaggccaaggcaggtggatcacctgaggtcaggagttcgagatcagcctggctaacatggtgaaaccctgtccctactaaatatacaaaaattagtctggtgttgttgtggtgggcgcctataatcccagctgctgaggcaggagaattgcttgaacccaggaagtgaaggttgcagtgagctgaaatcacaccactgcactccagcctgggcgacaagagcaagactccatcttaaaaaaraaaagtatgcatatatatatakakakagagagagagagagagagagagtggaaaagtaaaatcagacaatgattaaggaatatccactggattttgtgctcaggaggttgttgtgaccttagtggagtagtaggggtggaaggcaggttgcagcgggttagcacatgaatgggaagtgaagaagtttggctgaaaaaggaagacgaaggggcaaggagctaggggagggatgggattataagatggcagasttgagcatgcttatattttgagtgaaagggacagtagagaggaaaatctcaacgattctggaaagtggaaggctaagggaaagagagcgacacctgaagaagagaaggctagtgtccaggtcaccttgagccacaggacagaggcctcttgcttaaaaggaagagatgtggrtgagaacaggcgctcctcaccccatgagccactccttcctcaagtggctgggccagttgagagttctctgrtgacccctatgccgatggctaagaattaagatggagaggggtggtggactatyagttgtggaatatcaacctcagtgcacttttgtcaacactaaccacacagyatcctgactcccttgaaagggaagacatgtcacatgccttaatgccttaatgtgctttatctttcagagttgtggaaagtaaaaatgtagccctaccaaaaggaactattgtactggcttctccaggctggacaacgcactccatttctgatgggaaagatctggaaaagctgctgacagagtggccagacacaataccactgtctttggctctggggacagttggcatgccagggtgagtttcatggatatattccatttgtttgaatgtctgacactctgattttccaaaatggtttgttcagaacttggtcaacagraagatatttgatgcatgataggctcaggggctgatcagagaagagggcaggaccaagatggcagatcaacctaagtgtccatcaatgggtgaatggataaagaaaacgtggtctatatacatagcagaatactatccagccttaaaaaagaagaaaatcttgtcatttgtgacaacattggaggactttatgttaagtgaaataagccaggcacagaaaggcaaataccacattatttcacttcagtgtggaatctaacaaagttgaactcatagawttagagagtagaatgatagttatcaggggccgggaggctgaagggttggggagatgttggtcaaaggatacaaaatttcagttagacccaccatgcccggcatgaataaacattttagtaattaatgtttactaaaattaayaccttcttacattcaattagtggacactaaataattccagcacttcttattctttcctgcctgccctgtaccctctatgggtgagagctcttcctcctccttcgttatcctgctcatccttccctctgcactgtgagccaggtgtggggtaggagaggtgaaggtagacatgaggaaactttggttgttgagaaggtaatttgtaatatattaggagatcctgactcctgaaagagaagataatttattcacttatgtatatttcttattcatctgatccaagccactaaggaatgcatgttagatatttggattcttagaaaaaaatgctgcctgtgcctctcactgccttctattcaatgccagcctctcrtgggccccaaatatagtcagaggctgtgtaagctaagtaatgtcaacatgtagtttttttttttaatgcagaaataactttacatgaatttgtctgaaattctgcaagtggcttaacaatcactataatgggtctggattttattggctgagattcaggtctgcaaaaatatagcttaacattttccactactgaacttcatttctacctcaagccctccttttggctagtgtaataagagaaaacctcagttaaattcagtgatttctcacatcatttcaaatttaaaactcaggatttcttttttcttctccctgcggttgttgcaaagctccaagggataatacaagttcagtgtcagtagaagggggacaacaacaacttcttgatcttgatctatactggtcttaagctggtctcctgctcaaagttacttcctttctctaagttttgagatcctttccccctttccttcttcccacccttccttccctttccttttttacaactttgaaggtcttctgaggaatgaaatggaaatatatatacagtgccaaatggtcacctctaaacaaaaacaactcckatgtaccccaaattcatatttcactcagaatttgaactcctcaaaattgccactgccaaggacatcattgtgaaagtagaggatgcttaataccttcttacattcaattagtgggcactaaacaattccagcacttcttggtctttcctgcccsccctgtaccctctacggatgagagctcttcctctctattctcctctgttacctgtcattccctctggactgtgagccaggtgtaggggagaagaggtgaagggagacacgaggaaactttggttgtgaagaaagtcttcaatcatatcaccttccaaactcgcaatccaatgagatgcggtggtgtcttcacccagtccccatcagtactgccagtgctgcatcttggtaggtccagtagctcttttcctgcaagctaactttgacatcttacttggggtaatacggggaagtttcagaaggtcttccataccactttggagccatggaaagctccagatgctccctgtgaccctctcatgcctaatatcacagcattgtagctactctgtggctatgtcgccatgataacatgggggcttctcccatgaagctcatcatctacatagaacttatatgggaatgaggcacagctctctcttcttgaatccccaaagtttgagaaagatattccatcttttgcccctgaaatttggcctgtgaatggacaggatacagcccctttctagccaactctcccttccctccctagttcacatcacctttattcctatctgacagtagagatggaggaagtaaagcaacagtggctggcaatatttatttccatatttttgtcttttacttggacccatggcactgggccactgagaaggctttcaagatatatataaatgagttatagaggaaagaaacaactctattcatatatccttaattttcttcctttagcctgactgcctactttggcctacttgaaatctgtggtgtgaagggtggagaaacagtgatggttaatgcagcagctggagctgtgggctcagtcgtggggcagattgcaaagctcaaggtaagtgcctttctccagtaacaagcctttattcaaaacccattgggaatgcaacagtgaacacagcaaatcttccttggcctcagggagtttatagtctagttgtcttctttagaagttggagattgagaaattggaggaatggggaaaactataccaaagataagctgaacattgttatttgataacattgcagataatcaagtcagaaatggcctctgtctagagtagtgagtttatcggcatttatcattttcatattttttactgaacattctatcgctacagcttaatcttctttcttcatgattgtccttagcaatagaagaagggacttgagatgagccagctaagagtcatcacccacgtggccccactgccaaggctgttgtactagaaggaaatgggcattcagcccagagcagtggggccatggcttgggaactaactcctgggaggtacctaagacaaggaaacattggctctgatttaagcagatgtctgctcaagggatccaatctgayggtgggtgtatagagtaggcaacaactcagacacagtatggatttgttattacatagtgggaaggtgatctggctcaactgatcctttgcccaaggctgggatgcaggattcaggacctaggtcctaggggacaagttagatggagtacagatgagtacagggttacaaccaacggccaagggtttggactggtctccagtgctaatagaagcttggaatacaaatgtgaggctaccatagaagttgtagaataatttgtttaagtaagtaaataaataggaatagatattaaattttatcaaatgccattgcggcatttatcaggttcacttttcagtgaatgaattacattagttttccaatgtcgaaccattctgacatttgcagaataagctttacgtatgtatggtatawtatgggctacctttggaattgacttgataacatttaaaatagaatttttgcatctatagtcacaagtgagtttggtttaaagtttactttttgttctggaatttagctaggcttggattgtgctaaaattacaaaatgaattaggattatttctaaatattccaatttcaaatatcctattaaatcacaaggggcttttatcccgtaagtttgataggacttgcgcttaaacctattcttttatattcaacctttctgtccattttatgtgtgtttctgtaaaatgcagctatttgcatttttcacccatctgaaagtctagtgttgtaatagttaaatttaagtcattcttattaattgtcataactggaatgtttggtcatatttatattatcttactttgttttccatttattggttatttctttctgtgatattttctttgttcttttttctctaattactgagaacctaagttttatttacattctgctagtgtttacctttttaccaattatttaaaatctgttttatttatatcctgctactattcatatacatattttatattccaraataaacatatacatgtatatgaacttcaaacagtatattttttccccatattctaccctacatcctagatttttattcaataatctaataaataataaaaatctcattatcattaaaactttttggttatgacatctgaaaatgccttttaattttgatgcatatagaattcaaaggacctgccaggtgcagtgctgtgtgcctataatctcagcttctcagaattctggctgaggcaagaggatcccttgagctcagaagttcaagaccagtctgggcaatgttgtgagaccttgtctctaaattaaaaaaaaaaattcaaaggacccaatccctttctctcagagctctataaaattgctctactttttcaatttctatttagggttgcagatgagacattcaaagccaatctgattctctttcctttgtaggtaattagacttttctttkaggtgcttataagcatttcttgttattctttgagtttagaaatatcaccaggaaatgtctatatctgtctttgtttaatcctgcctgcaacttagttagccattataatctgaagaccaacgtttttcttcagatgaagaacagttttcttcttctatttaattatttttttcatctattctgttttcttcatgaggaatggtatatgttcattctgtttcccttaggactattcttgtatgctctctttgctctcataattacatcttttgtactttttcctctgaattctgtactttcttaatctggtcctccaattgaattacatgacttgcagcagcatcagtttctagattagcaattaagtttttcatagctgaggctcctcatattctaggattgcttcmtttccccataacctgcacttgttgactaatgcagtatccttttgaatttcactgagaaacttgaaacagtatgaacacatcttttaaaatatcttctcttccctgtagaaattccactggagactgccatgctaaggaatttatactcaatccttaaagaagtaacatgattggttctgctttttagaaacatcacttaggccttggtaggagaatagttcctagggacgctatrctagaaacaagaagtccacttaggaggctcttacaataattcaaatgaaaattttgatgcatcgacaaagattggaagtcagagtcagcttttttttttttttttgagatggagtttcgctcttgttgtccaggctggagtgcaatggtgcgatctcagctcaccgcaacctctgcctccygggttcaagctattctcctgcctcagcttcccgagtagctaggattacaggcatgtgccaccacgcctggctaattttgtatttttagtagagatggggtttctccgtgttggtcaggctggtctcgaactcccgacctccggtgatccacccacctcagccccccaaagtgctgggattacaggcgtgagccaycgygcctggcccagagtcggattttaaggctgtttggttaaaaaagaggaagaaaaccagatgattggacatggatcataagacaaaggaaagctkctcctttgagccatgtttcaggtttggataactgagtggtatcattctcttataatagtggatagaaaagaaataagtaagaagcaaggaaaaaagtatattcccttttgaacacactatttatgagggacctacaggacatccaagtgtgaggacatctataggttgttggaaatactgatttggaactcaggagaaaaaaaatgggctaacattaatagatagaattaatagattaattaataatctgcataaaggaggtcataagagtgaaagagatcatcctatgayagtctatagtcttagaaggaaaaaggaccaaggagggctctcttgcaatagttttttctggaatcatgaaggaatggaaaaagcctgtggccgtcactatttgtacagagattcatgtaaatccaactggggtttttcctcgattgaaaatgcacagtggcacatattctggtcttcataatacatttagagtataagggagctttctgaaaagctagtttctatgaaccactataatctgtagtgtcatcctgaaagtgcttttcagaatgcttcctagctcctctgtgattaggaagcgtgtagtctggtgctttggactaaatcaaaggataaagggggcctggtgcagtggctcatgcctgtaatccgagcactttagaaggctgaggcaggaggatcacttragcccaggagttcaagatcagcctgggcactttaggaggccaaggcagaaggatcacttgagcctaggagttcgagatcagcctgggcaatatagtgagaccctgtctctgtgaaaatttaaaaaatataaggccagatgtagtggtatgcacctgtggtcccagctacttaggaggctgaggtgggaggatcacgagcttaagaggtcaaggttgcagtgagccatgttcgtgctactgcactccagcctgggcaacagagtgagaccatgtctcaaaaaaatataaacatttaaaaaatcaaaaaaggataagggggcagttactaggagggctgtctgtgatgtgggagtcacagagctgagacaaaataatagtctgaagaatgactgtaccaagagatggcatacactgcattgcaaggaagagaagcccagaaacaaagaaccaaggaagtcaaatggatcggttgtgaaaccagctggtggaactatgaaccaaataaatgcagaagggacctgctgggkggtcagaagcaagctgaagctgagttgtaggatggtccggggactgatttcacctatgggatctgttrgcccattatggtattccttttatatgtggctcagcacctaagagagtgttcctagggaacctaggcatacgagaccaggaaagtagtgttggtccatgcttgtgacttattcatggtttcctttttttttttttttctacttagggctgcaaagttgttggagcagtagggtctgatgaaaaggttgcctaccttcaaaagcttggatttgatgtcgtctttaactacaagacggtagagtctttggaagaaaccttgaagaaagcgtctcctgatggttatgattgttattttgataatgtaagtacaaactggacttaatatctaatttattatggaagtactatataaagcaggagtctcctacccctgggccatggatcgttagtggtccatagcctatcaggaactgggatgcacagcaggaggtgaggggcaggtgagcaagcaaagcttcatctgtatttacagcccttccccattgctcccattactgcctgagctccgcctcttctcagaacagtggcagcattagattcccatagaagtgtaaaccctgttgtgaactatgcatgtgagggatctaggttgtgcgttccttatggagatcgcactactcaggtgcctgatgatgcctgatgcctaatgatctgtcactgtctcccatcacccccagatgggaccgtctagttgcaggaaaactcacccactgattctatggttatggtgagttgtataattatttcattgtatattacattgcaataataatagaaataaagtgcacaataaacacaatgtacttgaatcatccttgaaaccatccccccaacaatcgatggaaaaattgtcttccaatgaaactgctccctggtgccaaaaaggttgaggaccgctgatacaagggaatatattcctagagtttccattttggggtacatgaagaaagtatatatgccttttttaaaaaacagctttattgagatatcattcatgtaccatgtaattcactcatttaacgtgtagaagtcaatgttttttactatattggcaaaattgtacaaccagtttaagaatattttcatcaccccccccaaaaaacgctactcattagcagtcactctccattaccaccctcctccccactaaaagtggtctcttatgactggcatctttcacttagcaaaatgttttcaagtttcatccatatcatagaatttatcagtgctttattccttttttttgttttttgagacaggatctcactctgtcacctaggctggagtgcagtggtgtgatcgtggctcactgcagcctcgacctccctcgctcaagcaatccttccacctcagcctcccaagtagctgggactatagggatgtgccaccacacgcaactaatttttatatttttagtagagatggggtttcgccatgttgcccaggctggtctggaactcctgggctcaagcaaacctcccaactcggcctcccaaagtgctaggattacaggcgtgagccaccacacccagcctgatgggtattagcttatactttctggctatgaagtataatgttactatgaacattcatgcagaggtttttgtgtggatttttcatttcttttaagtatatacctatgagtagaattgctgggtcatatgataatttcatgtttaacattttgaggagctgtcaaactgttttgcaaagtggctacagtactttacattcccayaagcagtgtatgagggttccaacttctctacatactcaccaacacgtgctattgtctgtcttttttattataaccatcctagtaggtttgaagtgatatttcattctgatttgagtttgacttgcatttccctatggctaacaatattaaggatctttcaacgtatgtatttgccatttgtatatcttctttggagaaatatctgttcaaaatctttgcccatttttgaactaggttatttgtgaggttgtaagatttttttttttttgagacagttttttgctctgtcatccaggctggagtgcagtggcgcgatcttggctcactgcaacctccacctcccgagttcaagtgattctcctgcctcagcctcccgagtagctgggattacaggcatgcaccaccatgcccagctaatttttgtattttaaatagagacggagtttcgtcatgttggccaggttggtctcgaactcctgacctcaggtgatccacctgccttggcctcccaaagtgctgggattataggcatgagccaccacacctggccaagagttctttacatcttaccgatacaagtcccttattagattcagtggattttcattattcacaatatttatgttctataaggtcaccaccaaggctgaaaaccattgcttctaggggaaatatgtacatgtttgcacatatctcacatagactataatctgaaatccttaaaacaactcatcctagtagcttttattttatgaaagacaaaaggaggttcagaagtgttaagtaacttgcctatggccactccactagctaatacccccagagttgggattcatactccatccagctcttccccgaaccagagcctcttgaactgcactgcagtggccccatcctctggtcatctctgtgtaacagttgaaacaagaaggcagagcatggtcttattcagcctcagagaacatctgcatcttttttactgctccatgtatgtctgcaagtgaccagggaaagcttagtgagtactggtttgaggttacaaataaaattttagcaagtagtttacaatatgcaaatatgaaatccactaataatgaggaccaactctatatggcttgcaaatattttttcctattcagtgaattgcctttaaccttctttctgtttttgtttttgcccttttttttttttgagactcagtctcaccagtctcactctgtctcccaatctggagtgcagtatgtgatgacagctcactgcagccttgacctcccaggttcaagccaacctcctgcctcagcctcccaagtagctgggaccacagacatgcaccatcatacccagctaatttttatgtattttttttttgtagagatggagtctcactatgttgcccaggctggctttcactttcttgatggtattctttgaagcatgaaagttttaaattttgatgaagcccaattaatctatttttcttttgttccttgagcttttggtgtcatgtctaagaaggcttttcctttctcagagtcrtgaatatttattcctgtgttttcttctaagagttttatagttttagctgttacattcaggtctacgatgcattttaagttaatttttgtgtgtagtataaggaagaggcccaattgcattattttccatgtggaaatccagttgttcggcacgtttattgaaaggactatttttcctctattgaactgctttagcacttctgtagaaaaccaattgatcctaaatgtaagggttcatttttggactcgtgattcagttccattgatctgtatttctactctcacactatcttaattaatttagctttgtattaagttttgaaattgaaaagtgccagtcttccaactttgttctctatacaccttttgagtatttttccatacctttaaattataagacaatgaggttattggactgatcagagaacctcaatatataataaaggaaaatgtataagttataaaaggtatggtcttagaatcaaatgaaaaagcctgtttatttatttttctttttttcttgagatggagtcttgctctcttgcccaggctggagtgcagtagtgtgatctcagctcaatgcaacctccgcctcctgggttcaagcagttctcctgcctcagcctcccaagtagctgggattatgggtgcccaccaccatgcccttctaattttttgtatctttagtagagacaggrttttaccatgttggccaggctggtctggaacgcctgacctcaggtgatccacccacctcaaccttccaaagtgttgggattacaggtgtaagccaccgtgcccggccgaaaatgcctgtttctaatgtctttttctaactgcagtcttctgcactgttgggctaattcagtcagttttgttgytgctaaaacaggtattgtaaaataatgcttgtgacttaatgattctcctgaatctctagtatttagattatttaacattttgtctttgctatctgtttargtaggtggagagttttcaaacactgttatcggccagatgaagaaatttggaaggattgccatatgtggagccatctctacatataacagaaccggcccacttcccccaggtaatgagcacatgcacacgatcccatatgtcacaaggctggacaaggagaaaattcacagatatgccataggccagtgactctgaaattattagaaagattttcatatattcttttttttttttttttaagacagagtctcactttgtgagtgctcaggagtttgagaccatcctgggcaacatggcaaaatgccgtctctacaaaaaatacaaaaataagctgggtgtggtggtgtacacctgtagtcccagctactcaagaggctgaagtgggaggattgcttgagcctgggaggcgaggctgcagtgagctgtgttcctgccactgcactccagcctgggtgacaaagtgacagcctgtctcaaaataataataacaaaaacaataacaaaagaaataaaaatatatataatttcacatattttgtgctaaatcagcttatattagatttttatgtagagaaacagcaagatctacaaatataaaagaaacagttattaaaagttttagtttttacctatcatttaatgcaaaactgtaaaaagacagtgatgatttgatttagaaacagaacaccttggtctggctggtaaaatattcaggttcctctggatattagagacattgctggaggtgcgagaggaataaagtgtgacttgctgtgggtgaagggaagagcagactgccatgcccttcagaaatcttgggcagtgcttcttggagcagtagggcgtcttggcctcagcaggctgacaattgccactaaaagggaagggagcagcagcttccctccattccttgattgtccttgttttatttctctggtgccctgccatgcgctccattccccactccctactctcttatgctgaaaccacatccctcccrctccacactctgaggtccaaaagcagtatcaaccagagaaccatattcattaaatcccagtcctgtgagatgccttgtacaggcctctcattttatgggtgtggagaggaatggccaagaggaccagagactctttaactcctattggcaacagactcaaaacaaagaccagtcttctaagctcctcatacagagtctgtttctgctacagtgattctgtgctattaagagagatcayaaattacctatggtccccccccaaaaaaggagaaagtacgagaaagtaggaaaaaaaggaatcttccagactctaatcaggatccaggcaaccataaatcaatggttatttattctatgatgagcttgactaatgggaatgaaaccttatagccccactggttaaccaccacacaactgtatggagatgggggggctagaaaggaaggggctgacaaagggcaacttgtagattccctctcaggttgtgaaaaatcaaaatcattaccaagaaggaaactccagatttacttggcaatcttattgttagggacttttttttccccctataattttctaaytggtgctaagctggaatcatgggaaattgtctgcctgccaactgagcaaagctgcaggaggccttttcttaaccacagtccgattaggaatagccaaatattttggatacagtaactcgatctagtctttttagcaattagtctttggaagctcagctgctcagacaggactttgagatgtcagctggccttgtccgttccattttaatcagatggaattctgccctgccacagagccccagaaattctaacatattccactgttaggatagctcagaggcaagcaatgatttcctccaggtttaatgctacatatgcttttttgctctcagtaaaaaaacaaaaaccaacattctcatcaacacgcacaaatccagaaacagcatttcactttcattttgcttttttgtttattggtttgtttgttttgagacaaggtcttgctctgtttcccagactggagattttttttttaattttttaattttttttttttttttttttttttgagacagggtctcgctttgttgcccaggctggagtgcagtggcgcaatcatggctcactgcagcctccaccttctgggctcaagtgatcctcccacctcagcctcccgagtagctgagactacagacatgtgccaccatacctggctattgttttttgttttgttttgagacagagtctcactctgtcgcccaggctggagtgcaatggcacgatctcggctcactgcaacctctgcctccccggttcaagcgattctcctgccttagcctcctgagtagctgggattacaggcacaaatcgtcacgcctgactaattttttttatttttagtagagacagggtttcactgtgttaggatggtcttgatttcctgacctcgtgatcygctcccttcagtcttccaaagtgctgggattacaggcatgagccaccatgcccatcccactttcatttaagatgaggaaatgagagttccaatccctaactcacaaagaatagttgatgtgggtcttctgaagaagcactctttctgtctcattctcttgcattagtttcttttggttcaggacaaagcttcatatttccaactgctaatgttactttcctcaaagtaatcagtgggaactttaggctgagtggtgccagtggtcaaagatgctgaagctagattccaccactcgtcttagcacaccaggcatcttcgcctgacttcctggaacttgaaagcctatgctgaggtgtcattctgtcagtttctagtcaattaggacacttgggaaaatcaaccaggcaaccaaaaaactttttcttccttacacgcagaagggtagtatcttctttacaggctgcaggagagctgtgtgctttttctggggtgctggttttcaaagtgtgggccaaggaccagcagcatcaccatctcctgggagcttgttagaaatacaaattcttagccaggcgcagtggcttatgcctgtaatcccaatattttgggaggctgaggcaggaggatcgcttggcccaggagtttcaaaccagagcaatagagtaagacctcatctctgacagaaaaaacaaacaaacaaacaaacaaacaaaaactaaaaaaaattagccaggtgtggtggcatgcacctatagtcccagctacttgcagggcggaggtgggaagatcacttgagccaagaggtcaaggctgcattgagcagtgatggcaccactttactccagcctggggaaacagagccagaccctgtctcaaattaaaaacgacaaccacaaaacacacagacacaaaaacacccacatgtttattcttttgtttgtttacttctttttttctttttgaaaccgagtctcgctctgtcacccaggctggagtggagtggtgcaatctcagctcactgcagtccccttccgacttcaagcgattctcctgcctcagcctcctgagtagctgggattacaggcatgtgccaccatgcccagctaatttttgtatttttagtagagacagggtttcaccatgttggccaggctgctctcaaactcctgacttcaagtgatctgcctgcctcggcctcccaaaatgctggattataggcatgagccacgcacccgaccccacacacttattcttgtaggtctagaggttaaaagtaaaatgggttggcagggctgcattccttctgaagatgctagaggagaatctgcttccttgccttttcaagcttctagcagctgcctgtatttcttggcatgtggccccttcctctgtcctcaaagccaggggcataggctcttcctcctcctcctctctctcatctctgcttctatcaccccatattctgtccctgactgtaactttcctgtatccctcattcccttacgaagacctttgctgttatattgggtccatctttatagtggagaataatattcccatctcaaggttctttttttctttttatttttttgaggcagagtctcattctgtcacccagactggagtgcggtggcacgatcttggctcactgcaacctccacctgtcgggttcaagcaattctcctgcctcagcctcccaagtagctgggactataggcacccgccaccatgcccagctaatttttttttttttttaatttttagaagagaygggggtttcactatgttggccaggctggtctcgaactcctgaccttgtgatctgcccgccttggcctcccaaaatgctgggattacaggtgtgagccaccgcgccacccccaaacttcttaatcatatctgcaaagtcctttttgccatgtaaggaacaggttctggggtttttggatatgaacatgtttggggccattattctgcctggctgcagagtgcatgttgattggccagcagtcccgtggatcagaaaggagtgaggaaatggaaggggagaagcaccaaaaaactcccagcaccaagcacagtgacagtgacctgtactgcttgtttcaccatgggcacctccctggatcctgccacccaaatgtgcccttctcttcacaggcccacccccagagattgttatctatcaggagcttcgcatggaagcttttgtcgtctaccgctggcaaggagatgcccgccaaaaagctctgaaggacttgctgaaatgggtcttagaggtaaggagctccggagccaccccttccaattgtacactaggtcacactccctttgcctctcaaggcttttgttctaccaattcttccccatctctgccgcatcgtcagtttttccctattgggtcattgtgcttagagtataaatattcttacttttcccatctttgaaaggaaaacaaaacaaccctctctaaagttcatttccactgcaaatgcaggtccatttcccttctctcccttttataacaaaatacctggaagtgctgtctacactcactgtctgccattcctctctttccattcttccttaaacccacatatgaggcttttcagagtctcactctgttgctcaggctggagtgcagtggcacaatctcagctcacggcaacctccgcctcctgggttccagcaattctcatgcctcagcctcccgagtagctaggactacaggtgtgtaccaccacgcccagctaactttttgtatttttagtagagacaggttttcgtcatgttggccaggctggtctcaagtgatgcgcccgcctcagtctcccaaagtgctggggttacagttgtgagccaccgcacctggccaaaattaacttttgtcaaggtcacaggggacccttacatagtgaaatccactggttgattcttagcctcacttggctatgggaaatatttcatagtgatcattctctccttgatatgctttcttcccttggcttcccttaactcttggttttcctcactgattggtcctcctcagactcttgctagcttttctttactccaaattaatattagagtgccccaggtcatggtcactgggactttgctcttctctatctacgcttgagctatcccttagttagctcgtctgggctcagtatgctgggagttcccatctctatctccagcctggctctcctcttaactctaggctagtatgtccacctggatgcctgatacacatctctgacataacatcttgaaaactaaatatattttgatctttcctgctcaacatgctccatattcagactttactatctcagttataacaattctatacttctagtttctcaatccaaaagccttggtcatctttgatgtctttctgtcgtacccatgtctaatctctaaggagattctggtggttctatcttcaaaatatatacagaatctgaacacttctcccacctccctgctaccaccctggtccaggcaccatgccttctagcctggatgcttgtagtgtatcgggggaacctgcccccaatatttcaacataggttctttctatttttcataagtgttggctggctgagaaataaagagaaagagtacaaagagaggaattttacagctgggctgctgggggcgacaccacatatcrgtaggaccgtgatacccacctgagccacaaaaccagcaagtttttattaaggattttaaaaggggagggggtgtacgaacagggagtaggtcacaaagatcacatgcttcaaagggcaaaaggcagaacaaagatcacatgcttctgaggaaacaggacaagggcaaaatcagaattactgataagggtctatgttcactgtgcacatattgtcttgataaacatcttcaacaacagaaaacagggttcgaaagcagagaaccagtctgaccacaaatttaccagggcggagtttttcccccaccctaataagcctgagggtactgcaggagatcagggcgtatttcagtgcttatctcaaatgcataagacagacactcccagagcagccatttatagacctcccccaggaatgcattccttccccaggatattaattattaatattccttgctaggaaaagaatttagcaatatcttccctacttgcacatccatttataggctctctgcaacaagaaaaatatggctgtgtttttcccaaccccgcaggcagttagaccttatggttgtcttcccttgttccctgaaaatcgctgttattctgttctttttcaagatgcactgatttcatattgttcaaatacatgttttacaatcaatttgtacagttaacacaattatcacagtggtcctgaggtgacatacatcctcagcttacaaagataacaggattaagagattaaagtaagacaggcgtaagaaattataaaagtattaatttgggaactgataaatgtccatattaaaatgaaatcttcacaatttatgttcctctgccatggctccagccagtccctccgtttggggtccctgacttcccgcaacagtagtggactctacctggcctcccatctttgcatccctatagacaattcccaatgtggtggccatagcgatctgttaaggcacaaatcaaatcctgccgttcttatgatccaaaccatgcaaagctctgcatttcacttaaagtaaaccaaagtgctaatattcagtaagcttacacaaaatctgacccctgatatctctctgatttcatttcttagtattcatcctcttatttacttggcccagtctcctccacccctctgtaactgcttgctgaattctctcacgtcctgcaagcctttgctaaaaagtgccgtctggactggcacggtggttcacacttgtaatcccagcactttgggaggccaaggcaggtggatcacaaggtcaagagatcgagaccatctgaccaacatggtgaaaccctgtctctactaaaaatacaaaaattagctgggcatggtggcgtgcacctatagtcccagctacttgggaggctgaggcaggagaatcgcttgaacctgggaggcggaggttgcagtgagtcaagatcgtgccactgcactccagcacagtgacagagtacaactccatctcaaaaaaacaaaaagtgccttccaggtgaggcaagtttttaaatggccctattttaagttgcattccctcttcattcttgatcctccatatcccacgccccccgactttttttgttttttttttttgagacagggtctcagacacccaggctggagtgcagtgccgtgatcatggctcaccacagccttgacccaggctcaggggattctcccacctcaacctcctgagtagctgggacaacagtcatgtgccaccacacctggctagtttttttgtgtttttcgtagagaagggctttcaccatgttgcccaggctcctatcctacttttatccatagcaattaatcatcttttaacataatatatactataatttacttattcatttatatttattgcacatctcccttcttgaggatgtaacctccatgaagacagcatattcatacattttgctttctggtgtatctcyagcccccagaatagtatatgaagcaatgtaggcactgaataaatattgctgaataaatgaatgttagaggggtgcatacatgtgccacagctcttccaggtcccaagtagcaaataagacaatcccttagtcctgtgctgtgataattttcaaaccttacaccatgtaagttttagtcaacagaaatctgaacaatcaagttgcattattttagttttacaggggaaaaatgacatcatgtttcctaatccctggccaatgatcatttcccaattccaaagaatagattgctcctccagcagccactggagcttggcactcttcccagtatagcacttgcagtgccgggctgggctgtcaccagggagctgaatctaagttgtcccagttggtgaaatctaatgtaacccatctgtgatcacagttgacaacaggaaaccactgtgctggtgtccccagtgcttccctctaacaaagtgaagctgatcatagttagttaggtgtttatttatttatttatttatttatttttgacatggaggctcactctgtcgtccaggctggagtgcagtggcgcgatctcagctcactgcaacctctacttcctgggttcgagtgattctcccacttcagcctcccaagtagctgggattacaggtgcccgccaccattctcggctatttttagtagagatggggtttcacgatgttggccaggcttgtcttgaactcctgacctcaagtgattctcctgcctcagcctcacaaagtgctcgaattatacgtgtgagccaccgcgcccagccctagtgggttttaagtcgtgagttggcctaatttctttcacatactccctttttaatctcattccctattttttaaaattcactttttattttagaaaagttttaggctgggtgcggtggctcatagctataatcccagcactttaggagggtgaggcaggaggactgcttgagcccaggagtccaagaccagccctggcaacataatgagactctacaaaaaacaaaaagttaaaaaattagctgggtgcagtggtgcacacctgtagtcccagctactcgggaggctgaggtgggaggatcacctgagtccaagagttcaagggctgcagtgaactctgaatgtgccactgtcctccagccttggcaatagagcaagaccctgtctcaaaaacaaaaataaaaatagaagttttagatttataggaaaattgggaagatagtacagagagctcccatataccctgcatcctataccctaatttcccctattattaacattttacattagtatttgtattagtttgttaggtctaccaaaataaagtaccacagactgggtggcttaaacaacaaacttattttctcacagttctggaggctagaagtctaagatcaaggtgtcagcagggttgtttctttgcaggcctctctcttttcaacttgtagatggcttccttttccctgcatcttcacgtggccttctctctgtgtgtctatgtcctaacctccttataagcacaccagtcatattgattaaggcccacctgtgtgactttgttttaccttaagtacttttttttttgagatggagttttgctcttgttgcccaggctggggtgcaatggtgcratctccgttcactgcaacctccgcctgccgggttcatgtgattcttctgcctcagcctcctgactagctgggattacaggtacacgccaccacgcctggctaattttcgtatttttagtagagacagggtttcaccatgttggccaggctggtctcgaactcctgacctcgggtgatccacccgcctcagcctcccaaagtgctgggattacagacatgagccactgcgcccggcctcttaattacctttttttaaaaagccctatctccaaatatagtcccattgtcaggcactggtgattaggacttaaacatatggatttggattgggggcatacaattcagtccataacagtattcgttctctatttataacctctgaactggattctacctttccaccctatccagattccttgcttcttcaagaataagaatgagttggggctttcaagtcaaaagttcaaatctcagccaggcgcagtggctcatgcctgtaatcctagcactttgggaggctgaggtgggcggatcacttgagcctaggcctttgagaccaacctgggcaacctagcaagaccccgtctctacaaaaactaaaaaaattagctgggcatggtggcacatccctgtagtcccagctactcaggaggctgaggcagaaggatcactggagcccaggaggttgagactgcagtgagctatgattgtgccactgcactcaaacctaggtgacagagtgagaccctgtctcagaataataataataataataataataataataataataataaaagtttaaatttcagcttccctactttgtaattgactgacttcaagcaaatamtcttgtctataaatccatgaagagtgctaagccatcactggaatacattagcgaaaaacttgtatcaggtaactcaggtctctatataagaccccttaaaaaaatctgaaaatgtaaattagttcccattagtaggctgtgccttgtaggagaaagagaaatgaagaccctttctcactaacatgaacccttccttcccacactcccagataaaggttaaacacatgttraaagaaccttggcttaaaggsgagacagattattagactgtcctgccatttatatttcctgaataggacctgcctcttcaggggccagaggtaatgaagggtgctcttttctctgtctatttgtacctcctctgagatcattgtgttattaaactttactatgcatcttatttagaaattgcttaatcgctctgggcacggtggctcacgcctgtaatcccagcactttgggaggccgaggcaggcagatcacgaggtcaggagatcgagaccatcctggctaacacggtgaagccctgtccctactaaaaatacaaaacaattagccgggcatggtggtgagcacctgtagtcccagctagtcgggaggctgaggcaggagaatggcatgaacctgggaggcggagcttgcagtgagccaagatcgcggcactgcactccagcctgggcaacagagcgagactctgtctcaaaaaaaaaaaaaagaaagaaaaagagattgcttaatcactgccttatgacatttcgcactatgatccgacacctattatttcttcttaggtgtactttgtaatcttttttacatgtactgtgtaagtggatcttgccccaccttgacttcaagttcatggaggacaggacttccatctcttattttcaaggtttccaatgatgtacctgataaatttgttgctaggatgagaacagtatatcattgagaatattaaattaagttttaaaatttgttgttgctttgatacagggtaaaatccagtacaaggaatatatcattgaaggatttgaaaacatgccagctgcatttatgggaatgctgaaaggagataatttggggaagacaatagtgaaagcatgaaaaagaggacacatggaatctggaggccatttagatgattagttaatttgtttttcaccatttagcaaaaatgtatactaccttaaatgtcttaagaaatagtactcataatgagtttgagctacttaataaaatacatttaagtggtatgtaattagtgatggaggatggaagtttcaaagtcaacaacaaccagtcacctcactgttcactacagcttcttctgagttgtggtagaaaataatggctttgaagtgtgaaaattttccaaacactgtatgttttcattcataagtgggagctgaacaatgagaacacatggacatagggaggggaacaacacacgctggggcctgtggaagccggggtgagggagggagagcatcaggataaatagctaatgccttcgggggctaatacctaggtgatgggttgacaggtgaagcaaaccaycatggcacacgtttacctatgtaacaaacctgcacattccacacaattatcccggaactgaaaataaaataaaattaaattaaaaaaaaaagttagccgggcgtggtggctcatgcctgtaattccagcactttgggaggctgaggtgggcagatcacgaggtcagcagtgcaagaccagcctgaccaacatggtgaaacaccgtctctactgaaaatacaaaaattagctgagtgtggtggcacatgcctgtaatcccagcctcttgggaggctgagacaggagactcacttgaacctgggaggcggaagtttcagtgagctgagattgcgccactgtactccagcctgggtgacagagcgagactctatctcaaaaaaaaaaaaaaaaagtttactgcttctgtgaccttagacttctgatttttcatctttaaagtgaggataataacatctttcatatacatgttatacatttatttaaaacaccagcataggccgggcgcggtggctcacgtttgtaatcccagcacttttggaggcggaggcgaggtcaggagttcaagaccagcctggccaacatggcaagaccctgtctctactaaaaatacaaaaattagctgggcatggtagcgggtgcctgtaatcccagctactcaagaggctgaggcaggaaaatcgcttgagcccaggaggcagacgttgcagtgagccgatattgtgccattgcactccagcctgggcaacaagagcaaaactccatctcagaaaaaaacaaaacaaaacaaaacaaaaaaacaacagcataatgcctggcatatattaggtaagtgttagctacctccctgccgatatcagtgattttgaagtcttaagattaccacccctattgcttgtgattatgccagaagaaataatcactgcaggcatataggggtcttagggccagtccatactggtcctctacagatgagtctaattattcaacacaccaaagaaggaatctgtcattcacagagctgcacaaaagataacacacaggaatgtctatacatctacaaaaatgtgcaagatttatatgaagaaaaacttaaaacattactgaagggccaggcatagtggctcacacctgtaatcccagctctttgggaggctaaggtgagatcatttgagtccaggagtttgagaccagactggacaataccccacatctgcaaaaaattttcaaattagctgggcatggtgtgtgcctatagtcccagctacttgggaggctgaggcaggaggatcacttgagaccaggagtctgaggttgcagtgacctgtgactgtaccactgcactccagcatgggcagcagagtaagaccctgtgtctaaaaaaaattaaaaacaaaacaacaacaaaagcaacattactgatgaacacaaaagaagacttgaacatatggaaaggtaccatactcttggacaggaagaatctctctctctttctctctctctctctctctctctctctctccctctctctcctctctctctctctctctctctctctctatatatatatatatatatatatatattttagatggagtctcactctgttgcccaggctggagtgcagtggtgcgatctccactcactgccacctctctctctctctctctctctctctctctctctctctctctctatatatatatatatatatatatatatatattttagatggagtctcactctgttgcccaggctggagtgcagtggtgcgatctccactcactgccacctctgccacccggcttcaagcgattctcctgcctcagccccctgagtagctgggattacaggcatgagccaccatgcctggctagtgttttgtatttttagtagagatagggtttcaccatgttggtcaggctggtctcgaactcctgaccttgtgatccggccacctcggcctcccaaagtgctgggattacacgcgtgaaccaccgtgcgtggtgcctttttttttttttttttttttttgagatggtgtctctgtctcccaggctgacgtgcagtagcatgatctctgctcactgcaacctccgcctcccgggttcaagcaattctcctgcctcagcctcccaagtagctgagattacaggcgcctgccaccatgcccggctgatcttttttttttttttttgagatggagtctcgctctgtcacccaggctggagtgcagtggcctgatctcggctcagtgcaacctccgcctccagggttcacgcgattctcctgcctcagcctcccgagtagctgggactacaggcgcccaccaccacgcctggctaattttttgtatttttagtagagacgccctgtgttggccaggatggtctcgatctcctgacctcgtgatccacccgccttggcctcacaaagtgctgggattacaggcgtgagccaccatgcccagcctgatttttgtatttttagtagtgatgggtattgccatgttggccaggctggtctcgacctcctgacctcaggtgatccacccacctaggcctcccaaagtgctgggatgaggcactttgggaggcataagccaccatgcccggccagaagattcagtatcagtcagaaagatgtcaattctattgatcaattctgccatcatagagataaggggttaaataaattgtagtacaatgaaacaatggggagaagagtgtctgtacaaaaactctggaaagatgtaatacacttctaatatggtttgtcttcaaggaagataactaaggaatgcctgaaggacagggataagagaaaaaaaagtcactgcccgtgtcctcttttcttaccaaactattcaatcctaaagacattagaaggagccaagcaaggtgactgtctgctggggtttggggtgggagaacctctatggcccacagcagagcaaagaggtcatgcaccgaggctggctgcctggcacagggagtcaaagcccagagctgtgtgtgtgtgtgctgtatgtgtgtgtgtgttatatatgtatgttgtatatgtgtgtgtgtgagtgtgtgtgtgtggacactggtgagcaggaagaaggaggggttgggcagtgtgttgtggcctgatgaggggagttggagcccaagcaaaatgaacatggcttgagtcatagcagggtttcccagatggtgtatcagagcccaacaacagtgaagtcatccgtgtgggtagggcaggggcagcagggcctgattgagggtgtcagagtccaagtagggtgagaagggcattggaatcgcagggctgcctggtgtgaggagtcaaagtccacacagtatggagggcatcgtgcctgggggcagcttggcatggagtttaagggcccaaagtaaggaaggtgtgcacgtgaaggggtggcctggtgtgaagtatgtgatccctagcagaggtaggagggtatcacgtgcgagtgagtgacctggtatgggcggttggatcccaaggaggctgaggaggtgctgatgcatggatagcttggcagggaggtcagagcctgaggggagcttctacctggcagcatggcccagcatgagcagacagagctttgggaaggaaagactaaccacatggggaggcaagagtaggggccaggagctgcaggatgtcagagcttgagaggaatggaggagcatctgcaggagagggggtagtggtggtgatagaagatggttacatacagaaggtttgatcaaacaagtaaattaaagataagggaagccagagtttctcactgtcagagaagggagttacaaacatgggaagaaccttgtggtgttagattggaattggaggtattggtatgaactcatgaatttcaatgtgtatgagacaaaaaaataggtatgtgtgtatatatcatatgtacatagacacacatataaatgagtgtgtgtgcacatatatatataactctgcccactaagagggcctgaaagtagtgacactccaatagcaatgaacttatctaaattccagattgtggattttatatattattctctactaaaaggaaccagaaatggtttgttctggggctggggtagggaagatacaagatgagcttgcaacattttcagttttctttttttaagaggattcttgctatgttgtccaggctgacttcaaactcccaggctaaagagatcctcttacctcaacctcccaactagctgagacaacaggcatgtgccaccatgcccagcctggagcatcttataccataaatcaaagaagtgctcaaagaataatgaagtcatgttgaaagaacacagccaatttgaaagggctcccactagacaaatcatggaaaatttgagctccatgtagataatgataattacagattatatactattgaattaaaaagggaaaccatgagtccgtactgagacaaatacctgaatacactgaaaacttgatgaggaatggagtacttccatagtttttttttccgagacagagttttgctctgtcactcaggctggagtgcagtggtgcaatctcggcttagtgcaaactccgcctcccgggttcaagcaattttcctgcctcagcctcctgagtagctgggactacaggcgcgcaccaccatgcctggctaatttttgtatttttagtagagacagagtttcactattttggccaggctggcctcgaactcttaacctcatgatctgcctgccttggcctcccaaagcgctgggattacaggcatgagctaccatgcccagccctacttccatagttttaacatacttcaccacagaatactttttaattaccaagggtaaagaagttgtttaaagtgaagaagcctaccaccactgaatcaagtggtcaaggttaacatcatccataatgagacaaatgggccgggcacaatgtctcacacctgtatttccagcacttagggaggccgaggtgggcggatcacttgaggccaggagttaagaccagcctgtccaacacagtgaaaccccgtctctactaaaatacaaaaattagcagggcatggtggcacagccactcgggaggctgaggcatgagaatcacttgaacccgggaggcggaggttgcagagagctgagatcacgccattgcactccagcctgagagacagagcgagactccatctccaaaaaaaaagcaaaaaaaagataatgagttttcctgttcaacggcatggtacctttccatgtgttcaagtcatctttttttttttactggagatggagtctcgatctgtcgcccaaactggagtgcagtggcaccatctcggctcactgcaacctctgcctcctgggttcaagcaattctcccacctcagcctcccaagtagctgggattacaggtgcatgccatgatgcccggctaatttttggatttttagtagagatgcagtttcaccccgttagccattccatgtggtagaaaagaaaaaccaattttctggggaggaattcaagaaggctgcggaaatgctgcatgaggagctgaatgttaatagccaagacaatggggaaaatgcttccagggcatttcagagatcttcgcggcagccctttccatcaaaggcctggaggcctaggagataaaaaatggtttcacaggccaggcccagggtcacactgctctgtgcagcatcaggacatggaaccatgcattgtggccactccagctccagccacggctatcacaggtgaaggtatagcttgggcttaattgactctcagttccgcaggctatacaggaagcatggctggggggcctcaggaaacttacaatcatggcagaagggcaaaggggaagcaagcacatcttcacatggcagcaggggagagcaaaaagggggaaatgctacacacttctaaacaaccagatctcatgagaactcactatcatgagaacaacaggagggaaatctgccaccatgatcccatcacctcccaccaggtccctcccgcagcattggatacaaaccctaaaccttggcagtttctatgtggtgttggcctgcaggtgca

SEQ ID NO: 95440 - DNA, 24830 bp, Homo sapiens
ttacagatggtttttgtgcctagacaggattattcaaagaccacatgttttacagtttaaataaactttattgagggtattatttgtatccataataaaatgtacctctttttagtgcatttttccatgaggtgtagaaaatgtacggacctatgtaatcaccaaaaagtttcccgtgccttactgcaatcctcccaccccaacaccaagaaaccattgatttactttctgtcactatagacttacctattctagaacttcataggaatgagttaatacaatctttagtgtctggcttcttccactcagtggtgctttttatatttactcatgtttttgtgtatataagcattttgttcctttttgttgctgagaagtattctattgtatggacatatcacatttattattatttcacctgttggtgaacatttgggttgtttttagtttagagctatcatgaataaagctgctcccaacattcatatgcaagtccttatatacatgtgttttaatttttggagggtaaatgcctagaagtggaattactaggtcatatggtaaatgtgtgtgtaacttcattaaaaacaaaaacaaaaaacaaaacttgccaaactgtttttcaaagtgggtgtacaattttataatcctaccagtgaagtatgaattatttccaattagtccacaatcttgccagcatgtggtagtgtctgtgtatgtgtgttttgttttgttttaattttaccagcctagaggtcacatagtggtatcttattatggttttaatttgaattgcactggtgacgaatgatgttgagcaatccatctgtttatgtgcttactggtcatttatatatcttctctttcttttgagaaaacgtcccaggctggagtgcagtggcaccatctcggctcactgcaacctccgcctcctgcattcaagcgattctcctgcctcagcctcttgatatatatcttcttttaagaagtatgtgttcaaatctattgccatgtttttactgcttatttgtcttcccattattgagctgtaacagatccctatatattctgaatgtaggtcctttgttagaagtatgtattgagcatactttcttccagtcacagactgggagaaatttatttattcattttcatttatttttaagcaatggttttcaaagagcagagatttttagtttttataatttattctatttatttttattttcttgagatgattctgttaccagtggaagagatccaagttaccctgaattattagcggcgatctgtacacatctgcagcaacttcgtccttgcctcctcagaagaattcgacttcatctcaggattttataggcttacctctttcccatgattcttccctcagggtgggctgcctgcctagtgcctgcccccttacccttgggaattgagcacacacagcgtgtttaggaagtcatatgcatgcctatctgagactttcttccctttttctggaagagcctgcctggaatgtcttattttgccattttgtctcttagtgcacatgcccaggcagtttcttctcccgggcatctggattcatttaacgctttaatgttaacagctgtggatcaccaggaaatggcctctccctggcaccctggttaggctgccacattatcgtttttagagtggtggtgtgataattgtccaaccatcacctgacattcctagtgggtgggtagagagccctctcctgcctcactcatgcctatctaactacttataacaatacttaatatcaagtaaaatccacccactagaacatacatcccttcacaggggatgcaagactgctagcttcccccatttttaaaaaattattttttaattgacaagtgaaacttgtatacattgatggtgtacaacatattttgatataggtatacaatgtagaatggctaaatcaagctaattaacatatgcatcacctcacatatttgtgtatgtgtgttgtgagaagccaaatttattaactttttcatttatagctagtgatttctgtgttctgcctaagaaatatttgcctacctcaaggttgcaaagattatctctaatgtcttcttccaggagttccttggtaaattctaagtaattttatggcatgctgtaaaggtcaagttcctttttctttcaaaaaaaaattttttttttctttctaaaaatctgggattttggaaggagaaagaatctggatgcagcaaagggaagcacttgccttaccgcctggctgtgacatacatggagcattgtatgtcatgcaatgatatacactgagatgggcaaaactttcggttaaagcaaaaagaaacatctgggaatacagtggtgcttgctgaatccagatgattccatgctacatggtgaaagggctcaagcgggcagcaagggtgaccactggaccaaattaagggctataaggagcagtgatgtgcagggtaggttactcacaggggttattatattatctgaaatttacattaaaatacttggcaattaaagtgtgatatagttatgcgtaaattagtttttacaatctaaatagttaagatttgatgtgttgtaatatacggcacattagcataagggatgtcagatatttttcactggtgaaatgaggagtacttaatatatgcagatgggcttgagaactgtgctgatacttcccacccttcatggacagagtataagaattagtgaacattggatatgactaggtgacctctttgaatctcaatttctttctctgtaaaataggaaaaataatgtctatcttctaagggatattgagaggaatgataagacacgcccaactctaggcttggcatttaatgactgtcccacccaggttaatttgttccttttccttctaccactttttttactgtagtacttcgagctcctgattttatgtcacttaccacattctcttttgagttcccatctcaactctcttgctagacacagtcttgaagcttaactaatgctggcctccctctgaaggtcccatggcaaagctcatcaaatcttagtgtacccaatcacctgagatgctttttaaaaatgcagattacaaagccttacctcaaaagactgattctgtatgtctgtctgggtgtggtccaggaatgtgcagtatcatcgagcacctttggctatgatgaattaggtggtcaagaaccactcagagacacgtgggatgtgagaaaaacttgtttcagaaatcctacaattacattttcttcaaattcgagttgagacccaaacaaagacagctgacccagttctccagtcccatgtggaggctggactcagctgacccaggcctgaagcaggcccatcacccttgttacatgtttccgcccttctgggtgacataaaaatatcatttttgctggtccggcagcaatctccccttttctggtaaccccctggattttccctactcttagtgcaaagcttcaagcaaggctaatccctttccccaccatgaaagtgaaggtcagcctctcagacatttataagaacaaggaagaggaacactcttcctgtagagatactaaactagtaagaacctaagtctggagctgcctactccactcttacatagagtgcctacttgagaatgaaactaagagagatggtgccctttgacatcattaggcccctggggttcttgctaatctgagttactaattctctttttgctttacgtcagtttgagctagaatttctccttgcaactgaaaattctgactaacacacagagcctctacatttctctgcacaaatgaacgcttcctctctgggcagtcccaaataattcccctgtacctcactctcctcaaagaacgtcacctccttgccacaaatgcagggaacctgctccttgggaccaggtgcagcccacttttctttcttccttgcagggaaaaaaaaggccttttcctttgaggcttatgttacggagctcactgttcattactactgtcttcattacttaattcatttaagactgacacctgttttataatctctccttccaccctagctctgccatcattccagatggatctcatcattcatttaatagcctataatcatagttcatgtagcattcactacacaccaggcacggttctaagcattttacatatattttagttcactcaacccttataatagcacaagctattattacgcccacttctcacataaggaaactgaggcacaaaaaggctatttagacttgcctagagttacccagtcatgaagtggtagagtagggatgaggacaacggagtcaaattgcagagtccagactggcctcccagttccttataactgtaccatcctccacatctactctgcattggtgctgtggaggtgggagagagggagtacctccttcactgagtcactggacatttggaaggtctttggagagaagtcagctgaggatggcctgcattgccccttcctggaactcaatgatttgttgttatcacccatgcaaattcaccaacaaacagataaaagtcaggaagctgggatgcagctgaactgaaaacccagcagcagaaaagcaggttatagattctgctctgggtgctccatacagctccttcctctctgccccaataacctccctctctttgggaacattgctgcattcagggcagtctgtcttccctccctatgggctgtctttagaatgtgtcccttgcctatatccatattcatgctccgtgctcctcagccccctagaaactttgcacaatagattcaaaacctctggtttcctcccttcctctgtctgaaagagtgaaagaaggaagccagggatttcagggggcagccaggcagcagtatcaccacccctaggcaatcacacctagttgcagcttcatcgggaacagctcagctctgaaaacacagacctgggactctccctcccagccttctagctctcgttcctgtgagcagcttttcaacctccacttccagccgctgacaggccctcctggctccacaaggccagctaacatacccaccttccacaatccccagccctgccagacataacctgcaacaggcattcctggatcaatgcaaactccgacttctgttccaggagtctgcctctgttagaagaatctcacacaagtgtgcgtgctgtgccattgtaaatgctgtataaggtggccaggcccaatcagtccctgcaagacaccgaacagtaagaactatctatggagtgtttactatgtgccaagcaccgtcctttgcaagcactattaaccctcaaaataccaccaccgtgagattgagaccatcatgattcccgttctacagaaggaaacactgagacttcaggaggtcaggacctttccagggtcacaactgcgtaactaagttgcagagctcaacccagtggcacttccatctcacacgcagctgtctgatggtcaagagcccaaccagtcccccggtcgtttctaccgcactaaaccgctgtgtcaagctggagcagcgggctcagcagtgaaaatgaaagaacagaaggaggttacagagaagagaacggtcacggtaaattccggagaggaggcaaggacgtacacaccgagatacttcccggtcaccgttactcagcactttgtggggttcacgtggctgggggggccggggcgtggcggcccttttcgaggaatccagccctgcctgggcggtccccatctcgagcgtgggcgtgttcgattcaggcccggcggacgcatccccaggtgacccgggagggaccttgtgtctctgggggtgactgtccgtctccccgcctcccaccgtcacgcgcagtgctgatccccacttccagctggwgtgcgagctgggcttggggttacaggagccgaagccctggagctccgccccacgcttgcgccagccccgccccgatcccggctcgcaggctccaggggcggggcgwggccggggcgcagcgackggcgcggaggtccggccgggcgcgcgcgcccccgccacacgcacgccgggcgtgccagtttataaagggagagagcaagcagcgagtcttgaagctctgtttggtgctttggatccatttccrtcggtccttacagccgctcgtcagactccagcagccaagatggtgaagcagatcgagagcaaggtacgcgctaccggggaaggccagggtgccggcgccgcgcgcggcctctgtaactggggaaggcggtggcgggaggtggggaaggcggtggcgggaggtgcggaggccgcccctccgcatcgccaggggaaagggacgcggcgtctcggcctgggactgcgggaagcagcggcctgggcgcgcccgaggcggtggagcctgccctggaggaagggaggagaaggacgagggtcccctggagggcggagtggcggtgcccagcgtttctcgcaccctgttcctcgggggattgcacgcacgcggggagcgtccgggggatgtgagagcgcagacagcgtgaggagtccccacgctgcgcctcctgcaccctcccgtccgggcagccccgactggaggaagatgagggaatggaaggggtccgcccttggccccccatctgtatccagattcaggccccaggcaaggatagggagggcccttgcagaaggcacgggtcggtggccgccgctgcctttccgtatgtgaagtgatccacccgcagcgggggtagtgatctccctttgggagcgggtctaggccggagacccccgcctgcctccacccatgcccgaccccaaaggtgacgcgtgctgtatccgcactaagggggcggattgcggctggagaccccctggcacgtgcaggtctgtccaggaggcccgagggccccaggtgaccgcgaggaagtgaggtccgggccgcgcccacgggactcctgtggcgcagggcgcgtttccggcagcagtggctttggaatgactgagtccccaaggttgggcccgggggcctcggctgccctgcccgtccatgattcaccctcagtcggtgggttttgctggagccagggttcctcctgggagcagccgcgccctgctgcctgctcgccgacctatcggtatcccgatcgttgttttgtcctcttaaaaatgcccaaggcgaaacagccttcccatgtttgaaagttattgcaagcctaaaaccttgtagactgggaaacccagagcctaacgcgcagtgtctagtccaatgtagccactccagaaatatttgttaaatgcagcgtcagaaaagtgagtggaggaaattgatactgctcgaacggtagaagacccctcgccagcgcctaccctgcgattacccctccctacctgcgggaagcagaggagggcgggtcctcgcccgcctcgggtgccctgacctgtttggtgccgggtgggcttcggaaacagaagtgtgtctgcaatgtgtccccgatccttttgttcctttgattattattgactctcagtgttttttcctcrtatgttgattgccactgtcatcttttatcttcctctcaatcagttttttcttagtgggattctcattttagcagccctcatgtgttgaaaagatccttagtagtgaattgtctttcatatactttttttccaagcacctattgtgtgacaaattattaatccattcctggggaagggagtggggctgggattctgttctccagggtctggcaacctcagtataacccaactgctaagaaccccctccactgagccagaagacctttgagtggtctatgttagttgtcccaaaatccagacactacaaacaaagttgattaggatttctggagcacacagtttagtcctcccagttgtcagagcatgtcagagcaccttcctcctctaccagtgacaaaggtgtacaagggtgacaggaactttaaaaaaagcactacagcctggggcccaaaggccctgataatcaattaatcctcaaaataacaatccaaagtcattgatcgaaagttacactaatttgattgttatttgtctgttagtttgtttttcgagatggagttttgcccttgttgccctggctggagtacagtggcgcgatctcggcccactgcaacctccacctcctgagttcaagcgattctcttgcctcagcctcctgcacagctgggattacaggcatgcgctgccaaaatgcccagtaattttgtatttttagtagagatggggtttcaccatgttggtcaggtttgtctcgaactcctgacttcaggtgatccaccaacctcaggctcccaaagtgctaggattacaggcgtgaaccaccacgcccagcctgttatttgtaaatgttgaatacatgttacattttcatcctaatgggctaaatttgcaccatttgccattcagaacaattctgtttctgaggtactctgttggtgctttagggccaactgggatctatttcagagaggaatggaataattgactgtaaatgtgatgaggaagaaataaacacttttaaaaaaaatgacacctaccatttattgaactcccatctacaaggcacttggctaagtacttcagaaaccactcacacttattaccctcagagtaggtatgttgaggcaacgagatcttagactcttgctcctatttaccccaactacactgttctgcttcccccagattattggtgtcagtgatggagacatttattaatcctgttagtttctgggagctagaaattgtgatttcttcttagtaatacaatcttgaataattttcaagctgatacccgtttagaagtatcagaagagaatttgtacatgaagcctgcacatacgtggggtgtaactcatgttcagttaggctaaaagttattgttgcgtgcctcttttcagaattttaggtacttgtgcttaaatttgattcagaactgttttggaaaagccttgagtatgtttgaaataccttccctcttgaaagtaatctcaagtttttaataagggttaatcatgttaaaaaaacaaaamtgtctattcaaccagacattggcatttcttgaccttttttcctgtcttacctggatcttgcaataaaggatgcctggtttaactttcttgaaaatcacattagggaaggctttgaatgaaattgatctggaacaataagtgatgatttggaaaaacaattgctatacttctatgtaccctgctgcagctctccccatgtctccacctctagaggtggggttcagggatttgcataactaaaaaatttatgaaagtgttgtcctacctttctcaggaacaccatttgtgaattattttcccaaaaacgaggtagaaattagaaatctagagaagtaactattagtacatgaggtcatattagtgttttcttgttgggtttttttttgtttatttggttttttatcttatggttttttatttatttgatttctttctttacragacctcttgtggcggtggggggcggggaatgttcatttttttttaaacctatttgaccagcattgtttccttgaagaaaacctagatttcagatacagatgtttatgttttgatttatcttaattgctctggtttggtttttgggtttggtcagcactaacgtactaatgtggttaaaatgagtcctttgttttgggaggccaaggcgggtggatcacttcaggtcaggagttcaagaccagcctggtcaacatggcgaaactctgtctctactaaaaatacaaaaattagctgggactggtggcagaggcttgtaatcccagctactcaggaggctgaggcaagagaatcacttgaaccccggaggcaaaggttactgtgagccgagatcaggcctttgcactccagcctgggcaacaagtgaaactccgtctcaaaaacaaaacaaaacaaaaatgagtccttggtaactagaatattcggttcccagggttacagtatctagatagtaaataattcagggaagttagtggtaagagatttcttgatcatttctactgagaattttatttaacaagcattccttatgaaaaataatatctatgaaaaatttccttcatgaggaacgaaaactttcatttaatgaatgacaagggtatagttttaaaataaagggcaaaaatcaaaggttggtaaacgtgtgatctcagctctggaaaccccattatgcttatgtcaacggtgatgtctgagtgttgaggtttgggaaaggtgagtttccttgacttttcaaaaaattttagattttcgtatggtccaccatagacaaatgagtttaatcaaaagtcatagcttttttttttttttttttttttgcgacagagtctccgtctattgcccaggatggagtgcagtggcacaattttggctcactgcaacctccgcctcctgagttcaagctattctcctgcctcagcctcctgagtggctgggactacaggcatatgccaccacgcccagctagtttctgtatttttagtagagacagcatttcaccatattggccaggctggtctcgaactcctgacctagtgatccgcccacctcggcctcccaaagtgctgagattacaggtgtgagccaccatgcccagccaacttttatctttaagtaacttgtgatgtttcaattgcaaaatcctatgcctttgtgacttcaagtgacccctttcataatccataagtgtttaatgaatgtctaccatatacctagccttgacatggaaacatttttaatacaaatgtctatttttattttccttttgtttggtgtagagaaaaaatagccagttcacaatattttataaaatagttatgaagagaatgtcagtatactctacacatatcttgtttcatcttatcaagtaacactaccaacaatgtatagaatttcttcaaactgagttttatttggcttgtttggggatttttttttttttttttttttttttttggctaaaaagtaggtcctgaaaggaggacctccagaatgtgctttgtgtcattgtgtcgagtctttcttttgaaggtttaatatttaactatttatttaatataagcttttcttttgctgttagactgcttttcaggaagccttggacgctgcaggtgataaacttgtagtagttgacttctcagccacgtggtgtgggccttgcaaaatgatcaagcctttctttcatgtgagtattaaacaatgtctgctttgtaagasatttgtgttttttgagtyggtggtcacagtggtaggaaagaaagacagttaaaggattttggtttcggtggggggatttctttggctggatctttggtctaaaagtagtagtataacaaataatttaggtttgatacatgtagcccattgaaaacaaattttagaagttaattttgtcttaaatagttctttttttccccacattgaaacatgggccttatttgaaatcccagcctcagaatttgatatgccaarctgttttatactaagaaaaatttgatttagagaaaatttatgtctcttagatctatgtctccaaagatctaaatttttggatctttaattagtctctacttttattaagtttccatttaagaagcttgggtatgttgattgccattacctagttctaaatctttttggatttttcattttaaattttccagtccctctctgaaaagtattccaacgtgatattccttgaagtagatgtggatgactgtcaggtatgtagctggaaatatgagatactgctgagcttttcacattggcctttttctctgaattgcacagtgcttttttccataaatatgtcaaataattctagaactgtaatcctatctaaaaagttctatctcagaagagcaggcaagttaggagcttaatcctagctatcgggagctgtatatcacatcctaaagtaaacaaaaataaatgagtgagacttctgaatcttatcggccacccacctttctaaaaccctacattctactttacactctgagatgtgcaataaatggagattgaatttagctatgatcattacatccataggcttgatggagtcaccaaattatgagaccgcttgtagggctctttgtgaacttgcagtagcatgagaacctgcatttgcaagcctattctagtcttggttgattttagtcaattagaaaccacaaatgttttaacaaataaacaccaaggtacctgagagaataatttggaagaaattccagggttggttgtatttaacaaatacttgttttgcactaggtatataccaggcactgttctgggtggtttttaagtatcagttcatttaatcctgagtgctgttatcatccccattttatagatgagaaaactgaaacacagaggttgttcatgaagtttcagtgagtatgtggctgaactaggatttaaaatgaagtggtctggcttcccagcccttgaccttaagcactacccatcggaggatgctctgtcttgtgggtgtagatcgggtgcttagcacatgaccacagacctaggagagcgggttgaggaggtatcacttcggggccctttacagatatgtgagcattttcacttagccctagtggagaaggaaaggcgatgggggaagggtgcagtgtggcaacagaggcgctggacctggcttccagtcctggctcactagcatctgcttaggccagtcactcctcttccttgagccttaagacctgccccatcaacctcccaaggttgcttattcattgagcaaacatggaatatccaataaagggtgaagggtcacttaaaacaggcatatggcagtgctctctaaacatgggagggcgcaacaaccccagattgtgtattcttagccagtttttgactctgtgccttgggcaacccctgccttggcttgtgctgtcttctccatctggcctgtcctttcctttcctacctgactaactccttgtcatgagcttcaccccttctccacttaccgccttgtgtgccctaagtacccagtgaatcttggcaattattataatgatctttatgtctgtcctttaccattagtctcagtagattcctaggatcagagaccctgtcttaattcacgttggttgccccttcacctagcacacctgccttgcatgtagtataggtgtggaatgaatgaatgatgaatgtgatatggttgttaagttactattctagatgtgtcccagagttgtttttttttttttaaaaagagtgtaattgcatttttgtgaaaaatccttatyccttgttttaatcaaacttagtcttattaaggtcaatttagctaggggaaaattgcacctggaatagagaaattctaactgccactgatcctatcagatagcaacttgatttttttttttttttttttttttttttttttgagatggagttcactctgtcacctggggtggagtgcagtggcatgatctcggctcactgcaacctctgcctcccgggtttaagcaatcctctgtctcagcctcctgggtagctgggattacaggcatgcaccaccatgcctggctaattttgtatttttacaaaattaaaaccccagtagagacggggtttcaccatgttggtcaggctggtctcgaactcctgacttcaggtgatccacccacctcggcctcccaaagtgctgggattatccaccacgcccggccttgatttttatttgaaagcaataataggtgccagatgccatgataagccctttgcatgcactatgtcatttaatcctcacrataactatacgagtattttttattagcaccctcattgaacaggtaatggcactgcagcacagaaggtaaagtcagtctcttgaggcagaccaatgcaccatactgtactgaggacaggtcttcttactgcctttaggaagtacagtcatgcatcacttaatgatgaggatactttctgagaaatgttaggcaattttgttgtgcacacatagagtgtacttacacaacctagatggcatagcctcctgtacacctaggctatgtggtaaagcctgttgctcctaggccacaaacaggtaaggcatgttactgtactgaatactgtaggcagttataacacaacagtaagtatttgtgtatctaaacatagaaaaggtatggtgaaaacatgatatgaaagattaaaaaatggtatgcctttataaggtacttgccataaacgggacttgcaggactgagaggtgctctgggcgagtcagtgagtgggtggtgagtgaatgtgaaggcctagaacctgtagacgttataaacactgtatgcttacaaattttatttttaaaatttcttttttcagcaataaatttattgtaacttttttactttatagtttttttatttttttaactctttaactcttgtaataacacttagcttaaaacacgaatgcattgtacagctctacaaaaatattttctttatatccttagtctataagctttttttaaaaagactttttaaactttttgttacaaactaagattcaaacacatacattagcctagaccaacacagggtcaggatcatcagtatcactgtctcccatccccacatcttgtctcacagaaaggtcttcagggacagtaacatgcatggacctttcatctcctatgataacagtgccttctcctggaatgcttcctgaagggcctgcctgagcctgttgtatagtaactgtctttttaaaaaaataagtaggagtacactctaaattaataatgaaattaaagtaaatacaaaaaccagtaacgtgggtgtttattatcaagtagtatatactgtccataattgtagtgatatgcttttttaagtgaaagcaagtttattaagaaagtaaaggaacaaaagaatggctattccgcaggtaaagcagtctgtagtggtatactttgtatgtaattgcagcgcagatttgtttgcaccagctaatgcgatgggctatgacattaacccatcactaggtgagaggaatttttcaacttcattataatcttatgggaccaccacatatatgcaatctgttgtcgatctaaatgttatatggtgcattactataggtgtgcaaagcactcgaggacttccgtatgacagagctcctccttcatgtctgcttggtgcaccctgatcaccctgaatgtatcttttttttttttttttttgagacrgagtctcactctgtcacccaggctggagtgcagtggtaccatctctgctcactgcaacctccacctcccgggttcaagcgattcttctgcctcagcctcctgagtagctgggactacaggcagccgctaccacaccaggctaaatttcaamtttttagtagagacagcattttgccatgttggccaggctggtctcgaactcctcacctcaagtgatccacccgtcttggcctcccaaagtgctgggattasaggcatgagctaccgtgcctggcctgaaagtgtcttttaaaaccttgaagtgaccctctgacaaactgaggaactttaactttgcctccatagattgayagaaaagtatgagtagtagcccttttgaaaatgatagaccaaccttatttctctgacagccaacagggttatgatacttattttataaatggtaacctccctctgacccttacttggagtgagttttcaatagtatgcattcaataaacattcaccatttttattccagccattactgtccttgtgcctcttactggaacctgtactttcatgctcagcaggtgtccagcattaaaagaaaaagtaaagattacctagaaagaactcctcaacagtagtgccacccaccatcctagaggtcgtcatagtgtttgtagctggcctttcttccccttgagaattctccgttggtttccgtgatttggttatcaacagtcctgcctgctcgcttgctgtcctgtgtagcttttgctgcttaggtgctgagtggttctatatttctttcccagtcctcttttgagtgcctggctgacattttcaatctctattgggctccaaaccaaaccagtttcgtggtattgtcctccaaaccttgccctcttatagcatgaacaatgtgttgagcatggggtattataagagttctcatttagcattccacagttgaggaatgtgtgttacttcaattacctttgagctgtagaaaaatctttagctgtggtaacagccacttctaggagaggagaaaatacggatcaactagcccaatttgcgatgttaggaatttgtcgattttcttagtaggatggctttcaaaggttagagcatcagagtcacctgaagcccgactttaactgtaatggtttaagatggggttgatggggaaacttgtagtacccctcaggtaattctgatactgcagcaaggtttgagaattcacaaagtctttttatttttcctcccgagatagtctcattctgtcgcccaggctggaatacagtggcatgatctcagctcactgcaacctccgcctcccaggttcaagcaattgtcctgtctcaacctcctgagtagctgggatgacagatgtgtgccaccacacctggctaatttttgtatttttagtagagatggggtttctccgtgttagccaggctagtctcgaactcctgacctcaggtgacccaccggccttggcctcacaaatcagtttttaattaaaaataagcaggaggctgagtgtggtggctcacacctgtaatcctagcactttgggagcccgaggaaggtggatcacttgagctcatgagtttgagaccagcctgggcaacatggagagaccttgtccctataaaaaaaaaaaaaaaaaaatatatatatatatatatatatatatatatatatatagtgtgtgtgtgtgtgtatatatatacacacacacacacaaaattagccaggtgtggtggcgtgtgcctgtagtcccagctactggggaggctgaggagggagratggcttgagtctgggaagtggagattgcagtgagctgagactatgcccctgcattccatccagcctgggtgacacagccagaccctgtctcaaaaataataataatcagtaaacccagtgtggggttattcctttagattactattattttgttcttgaacaattgatttttatttttttagactttttagcctttatataatcattctgtgtactctgccttcataataaaactggaaaaattatgagcaagaaataagaggtactagttctgaggaatagttaagattatcatactgagtccaattgtagcagaattttttgttgcttctttgtatgatacttaaaatagttgaaaatttgattggattaaagagcatattggatcgctggagtatctgatgctagtaacattctgaacattctgcctgttratgtgcccgtcaaaggaagtaaatattaataaaacttcattgagaatataaccggtttggcttttgtamtgccattatattcattatattaattttcatatgctgaaaaatgtcctcatgcggaaatgtggggtacatgacagggaaaagtttctggttttggattacttctgtcaaagctcagtactcgcagtcttgtatttaatcctctccctttgctactttccctaccaggatgttgcttcagagtgtgaagtcaaatgcatgccaacattccagttttttaagaagggacaaaaggtacgtacatctgacctttaaaactctaactgggcaataggaaacccagtataagtgaataaatcactggagkgatgttccctttaaagattgaggcatatcaccaagttctgcttttaagaatttttaaatatgccaaaattcattggcttaagtacataatgtgacagctaactgaaaatcaatctttcctagaactagtcctatttatatcataaagcacatagaatttcttagacttgggcagttcatttgttgttaagtattgtgtaaaagaaaatttgtacttgagccttttgacttttctcttgatattttttctttgtttataacttaaatgaactgtatgttattcagggaagtttattttaaataagattatacttctttttccctccacccctattcttccttcattctatgctgaatacatatttatacatatgtatatatatacatatgtatatgtatatatataaatacatatttatacatattttatgtataaaacagtgctacagtgctacgtctaatgtcaattcaatattctcttaacaggtgggtgaattttctggagccaataaggaaaagcttgaagccaccattaatgaattagtctaatcatgttttctgaaaayataaccagccattggctatttaaaacttgtaatttttttaatttacaaaaatataaaatatgaagacataaacccagttgccatctgcgtgacaataaaacattaatgctaacactttttaaaaccgtctcrtgtctgaatagctttcaaaataaatgtgaaatggtcatttaatgtattttcctatattctcaatcactttttagtaaccttgtaggccactgattattttaagattttaaaaattattattgctaccttaatgtattgctacaaaaatctcttgttgggggcaatgcaggtaataaagtagtatgttgttatttgttatcttttgacagagaaaatagcattctctgttttagcaggtgaatcctctatgctctccaaaagatcagcatgaccaaaattgatgtccactcatgaaggacttgttcgttttgtttgtttgttttgccacgaggatcggatcttgattctcctcgaagtatctgagaaagtctagttgtataggccagacataggttctgtcttgagtggtaaaagttgtgggaaattattacttatatcattcaaagaacattgtttcttgtgttctaagcacagtaaggggttgggggtttgaagaaactttttgagtttacataataatgaagagcagaattatcatatgccaggtatcatctttctattaattcacttaatctttgtaacaatcctattagatatagacactataatccccatttacctgtgaggaaacagacaaagggtggtaatttccccagcatcacaactagtcattggaggagctgggatttgaaccaaagaagtctggtaccagaatatgtgcctttaactactacattgccctcagtgcaacaatctgagtaagcaggaaaatgatgggcccttagttgagtttctttcctcatgtgaaattaggatgccaaacttagatgatctctcaaaatactaatggaatgcctgttatgtgccaggcatcatgctaggcttgggataaagctgtgactaagacaccctcatcctcatacagcttacattctagaagcagagacaaactggtgaataatagactggtatattctacaaggcaaaaccaaaaactgggtgcagtaatgagaagaataggggaacccgctgtgcatcaggtggttggacctgggttctttgaggtgactgtaaacagagctgttggataaaaagtactccaacctgctgagagccagggaatcagctttcaagcagagagaatgacagacaaaggcttgagtcaagaaagagcttggtaccttgtagaatcatcagaggagcatgaaataaagctcgatagagtggcagggccaggtcagccagggcgttatttgttctagaacggatgagaaaccatcgaagggtaagacagggtacatgctttgttaacaagttattttggcacctgtatagaaaacggaaactaaaaagtggaaaaccagttaggcttttttgtttgttttttgagatggagtttcgctcttgtcagccaggctggagtgcaatggcgcaatctcagctcactgcaacctccgcctcccagggtcaagccattctcctgcctcagcctcctgagtagctgggattacaggcacccgccaccatgcccagctaatttttgtatttttagtagagatgaggtttcaccatgttgaccaagatggtctcgaactcctgacctcaggtgatccacccacctcagcctcccaaagtgctgggattacaggcgtgagccactgtgcccggccccagttaggcttttgcaattacctagatcagagataatgatagctgtgactaggaggacagtggggaagtgacagagatggaacaaagcctaagggcctgtgagaggaagacccaggagtgaatctcaggtttctggcagaagccctgggtgtcggggtatgatgtgatgtcatgagtgaggtgaggatgggagggagaaaggggtggtggtgagggagtcagtctctggcccttctgagttgggtgcttctgaggtgcacatcccactgaaggtgctgtgcaggctgttgggtacctagttgagagctccaaggacaggtctggactgggatagaaatttgcaagacattgtcatgtagatggcacttataaacaaacatgacatcacccaggaagagtccagagtgaagagggctcaagatagcctgaaggactcaatatttggagatcaagtagaataggaaccaacaaaggagactgaagggtggccagaggggaaagacaaaaaccagaagagggttttatcctggaagaacagaggagaacatttcaaaaaggaaggagtatcatttaccaaattcccttggagctaagaaaggtaaggttgagaaaacaaaatggaggttggtgattgcaacacaaaattcctatggagtgatggggaaggaagccagattggagggaacagaaatcacacttctcatatctgtcaagcaatccggccacctctgcctcccaaagtgctgggattataggcatgagccactgtgcctggcccaaacttgtagttataaaatgaataagttctggggagctaatgtgcgccatggttactatagttaataataccgtattgttcacttgaaatttgctaagagtaggtcttaagtgtgctcaccccaccctccacacacacagacacaaatggtaactgtggtgatagatatgttaagtaatgtgattactacacagtgcattcatatatcaaataattacattgtacaccttaaatataagcaattattgtcaattatgcctcaataaagctagaagttagaaaaaaaaaaaaaaaagaatagattcagaccacaataggagagattggtgttggttatgtctttcctccaccataaccagtgggatgaaagtgagcgcaaggttagagagcattgtcgatttagggatgggaagatggcatttccatctgatagtttctgttttccaagcaggcagttttgaggagaaggtatgaaattgttatcttcacagtggcaaagcaaagcatggtttctgggcgtagttgagtgtctgcatgaggtttgttaggacctcagagccctgctgtgtgtgcaggcaactgaaggtggagagttgaagccggagcaggattgggtctttgtagttgagtccagtagtgagtggggatgcagagaagctgacagtacttttgagggattgattatactgatgcagtatagaatcaaggctggagaagtagagaggagaagccaagaagaggctggtgagccacagaaaaaggagtgtctaaggattagaggtcttgacaaggtcaaagaaggctggcagtgggagtgactgagcaagcaaactttaagaagatgagaggtggtaagcagagtgagatttaaaaaacagatttgagaaacaaatttccagagaagacaaagactagggtgaccatgagaaggaggtgaagtggggtagaggaagattggaactcagcaggtcaaggatttgaggccaggaacatacatgggtttcagggaaagaaaatgggaatagggatggaaagagaagtctgtgaggtgaaccatctttagtgagtgaggaggttgatagcagatggcagcagtaaggaaggtaggaagttggtacaacttcatgaatgagtttcagagtagtaggagattttgcaagaaggagaagtggtttggaaggggccttaggtggggaggcaagcaaaaaatccagtcacctcctgacttgggtatgtggagtgtaaagtgtaggggagggggagcccttaggatgtttctgttaaggaaggagttgatgttccaagaacacattaaagatacagaaacggttcctgatccaaagcaaacttccagcagttactgtgaaagggacggggagggagggtttgttcaggttaagggcatgggtctaaattttggcagcacttagaatcaactagggagctttccaaaaacaaaagtgatgttgggattccagtcccagagattttgctgtaaatgggcttgggtgttgcctggacactatctgatgtgcattcaaagttgagaaccagcagtttaagggatatacaatatagccaggagatgatgggtgaccagctgatcacccatctctggcagtgattgtggtcaacacaatgaaattcattgatagtctcttagcatgagatggcaaacatcctaattgttgcagaaggtagttaacagatgctttttatttcttgattcgaaagcagtttaagagacgaacataaatatcatggtgtttcttctcattcatatcgtttcatagctgtttactgccaacctccaaaaaattcacagatgctaaactttgttgctttgttatggaacaagtgtttagagtagatgctttataacttgaatatattattacctatttaaaatagtaaagatattagagttaactaaagatcatactttataaaaaaaatctcagtaactgcacagcacaattcaatgtcacataaattctattgtccccaaagtggattacttatattaataaatctagaaatattagtgagcactttttacttgtcaatacataaagtaatgaaggtaaatataggatttatagttccgtagaatatagactaactagtcattaaaataaggcaaatattggctgggtgtggtggctcacacctgtaatcccagcactttagggggccaaggcrgggagatcacctgaggtcaggagttcgagaccagcctgaccaacatggtgaaaccctgtctctactaaaaatacaaaaattagccgggcttggtggtgggcacctgtaatcccagctactcaggaggctgaggcaaaagaactgcttgaacccaggaggcggaggttgcagtgagccgagaccgagattgcaccactgcacttcagcctaggcgacagagtgagactctgtctcaaaaagaagagaagagaagagacaaggaaggaaggggaggcaaggggaggggaggggaggggagggcagggcacagcaatggaggggaggggagaggaggggcaaaaagagtattctgttacatgaatactgcaaaatgtatggtatagcacactaccctagagttgttcatggtcatccagaagaagcatgagcttaatggcatggcagttactttggaggaaggccaggaatccaacagctagaatttgaagcagagcaccagatgaagctgcaacggaaggttggagccttgaacgccttggaaataatgtggtctcttgttccctgcatcgcaatgtgttttatgtcatggcacacaaagaaaacaatatttgaaccccccactgggttacagtggaaaggatttgggaacatctgtatgtggcttagtgaaaaaatgacatttttactttaaaccattttaacacaaaaaccaaatggaaactattacagagactgttaactcctgaatttgtataaaacttccacaaaaatatcttacctaattttttagtgtgaaacttcaaggtcattttcatgaatgtaacttctctaaaaatgtttaattgtgaaatacagaagaatatataaaacacatgcacaattttagaaatatcaacaaaatggctagctgtgtagtgatcgcccaggttatgaaacagaacattgccaatatcttaaaagtccccagtgtatacctatcataccttcttcctccacctgcccagagataaccccatatggctcttgtgataattatacccttgcttcttgcttttttctttctttcttttatttttttcctggagacggagttgcactcctgtcgcccaggctgaaatgcaatggcacgatctcggctcaccacaacctctgcctcctgaattcaagcgattctcctgcctcagcctcctgaatagctgggattacaggcatgtgccaccatgcccagctaattttgtatttttagtacagacagggtttcatcatgttggtcaggctggtctcgaactcctgacctcaggtgatccacctgccttggcctcccaaagtgctggaattacaggcgtgagccaccacacctggcccatatttgtgtatcctaaacaagacaattcacctggttttgaatgctatgtaagtggtatcatcctgtgatctgcttcttgcactcaacaccatgcttgtgagtgtcactgtgttaatgtgcataattgtagttcatttgttttcccgatccagagtattccattatatagctacaccacaa

SEQ ID NO: 95441 - DNA, 107442 bp, Homo sapiens
  misc_feature (1)...(107442): n = A,T,C or G
tgacccaaactttcatttctgaagggtctgggccatttatagtcctgcttggattgggctgctgtagtttcccatcgaccttaaccacggggtatggtaacactgagatgccctaatggatctcctgtgaatactgtggagtagtagactgatttcatcttgataatccgggtcaatcacaccaggcaacactaactcccttcttagcccattgacttaaaaggtaggaggagcacaaaatgtccaggtggcaatcttaacttcccatttaatggaatcattgttgtgtctcctggtggcagcattcctccctctggaactaagacctctaggccatcagaatgtaatgtcacaggaacaggaagcaaatatttgctagtggatcattgggcgttacggtaagtagtgccacttccacttctaccccttgattcctggacccatgaatcctggctatgggagaaacagtaccatatattgaacactgattcagagcatacacaaccttctggagaactttgccccagccctgcaaagtattgtcacctagttggtgttgtaattgtgacatcaaaaggccattccactgttctatcaatccagctgcttcaagatgatggggaacatggtaagaccagtgaattccatgagcatgagcccactgccacacttctttagccataaagtaagtatcttgttcagaggcaatgctgtgtggaataccacgacagtggataaggcattctgtgagtccatggatggtagtcttggcagaagcattgtgtacaagataggcaaacccatatccagagtaagtgtctattccagtgaggacaaacctctgccttttccatgatggaagaggttcaatataatcaacctgccaccaggtagctggcttatcaccatgaggaactgtgccatattgagggctcagtgttggtctctgctgctggcaaattgggcactcagcagtggctgtagccaggtcagccttggtgagtggaagtccctgttgcccatgaataacctccatccctgccaccatggccactttgttcacgggtccactggatgatgacaggggtggttggggaaagaggctgagtggtgtccacagaacgagtcatcctatccacttgattattaaaatcctcctctgctaaggtcacccgttggttagcacttcacagtttttgagcattcagagaggtccatctacatacctcttccccaaattttattgtcaccaattttccaatcttgcttcttccaagtccctgaccatccagccaaatcactggctaccgcccatgaattagtgtataatcatacatctggccatttctccttccatgcaaagtgcacatccaggtgcactgctggaagttctgcccactgggaagatttccctttattgctggcctgcagggatgtcctagaaaggggctgtagtgctgcagctgtccactttcagatgatgcctgcgtatcatgcaaaaccatctgtgaaccgggccctagtcttctcttcctctgtcaactgatcatgtcaactgatcatgatcatagggaactccccatgaggccactggtgcaggctagggcaaagaaggcagggtggcacgagcggagaccatgagcatttgagccacttcctcatgtaacttattcctcaggtgccttcaggacctgctagagcccaatcatgcatataacacttccacttgatgatggaatactgctgtgcacgacccactttatggctagatgggtcagaaagcatccagttcatgataggcagttcaggtcacatggtgacttaatgacccatagtcaaacgttcagtttccaccaaagcccagtaacaggctaagagctgtctctcaaaaggagagtagttatctgcagaagaaggcagggtcttgctccaaaatcctagaggcctccactgtgattcatttatggtggcctggcaaaggctccaaatagcatccctatctgccactcatccctcaagcactattggatctgctgggtcatatggcccaagtggcagaacagcttgcacagcagcctggacctgttgcagagccttctcctgttctggaccctacttctggtaccaaaatccgtattagtcagggttctctagaggatatatatatatatatatatatcctattacttccttatatacgtgtgtgtgtgtgtgtgtgtgtgtgtgtgtgtgtgtgtaggggagtttattaagttttttttttttttttttttttgagaaagagtctcggtctgtcaccaggctggagtgcagtggcgtggtctccgctcactgcaacctccgcctcccaggttcaagcgattctcctgccttagcctcccgagtagctgggactacaggtgtgtgctaccacgcccagctactttttgtatttttagtagagatggggtttcaccacgttggccaggatggtctccatctcttgaccttgtgatccgcctgcctcggcctcccaaagtgctgggattacaggcataagccaccgcgcccagcctattaagtattaactcacatgatcacaaggtcccataataggccatctgcaagctgaggtgcaaggagagccagtccaagtcccgaaactgaacctggagtctgatgttggagggcaagaaggggataaacgcacaggagaaggatgtaggctgggaggctaggccagtctcatcttttcaggtttttctgcctgtcttatattcactggcagctgattagatggtacccactcagattaagggtgggtctgcccttcccagcccactgactcaaatgttaatgtcctttggcaataccctcacagatacacccaagaccaatactttgcatccttcaataccatcaagttgacactcagtattaaccatcacaagccctatgaaataaaaagttttatgacccctttcttcccagaattatgaatgccaatttacttgctctacatttacgcaacttccatgacctggggtaggtaggtatgcaatgttgtgttacttccccattgtccatatccacttgtgtccctggccatggccaactaatttacaggttgaaacatttcccagcaccttggaaggctgtgtggtgggaggattgcttgaggtgaggagttcaagaccaacctgggcaacatagtgagacccctgtgtctataaaaagtaaaattagccaggtgtggtggcacatgcccgtggtcctggctacttgggtggctgagcccaggaggttgaggttacagtgagccatgatcatgctgctacactccagcctgggtgacagagcaagatcttatctcaaaaaaacaaaacaaaacgaaacacattgtactagactgtcttagtatttgaagcttgaacagatacacagaaaagacagggaagccacctacaatgcattctagaaagatcatgctgctgaggatcatggaagcaccttagttcccattgtcaagcttagttgttcagctcttccttaagttatataaactatcccagaattcttctaaattctccaacccctttaatttggtttaaattagccaaattacgttaatgttgcatataaccaaaacttaagggatataaattggttgggagaatgtgttgtaaccagtagtctgtcaggaaactgttgcatttttaggtagttttatcaagctgagaaggggtgaaatgagtgagacttacctgactttcaagacatctatttttcaaaccatttgttttcacttctttactgtgttatcaccatcctcccaggactttacaccagaaatctgaaggtcaccactgataccatcttccccctttgctcctacatctaatcattagttacatctgccaggttccatatcttgagtatgtcttttcatttctactattactgccttagttcaggttactacttttcttacacattacattactatgggcttttaaatggcttctgtgcctttatctactcacaaactattcttcatgctgcagtcagaagtgttctaagccaaaattattcaccttccaaaatgaagatctaattatgttcacaagtcctctccttcacccattcctcacctctagcattaatctaacactaggttaatcaaggtaatggggtagaaggtcatgggtaactccaaatcacactttaaatgaactctagtcaaagtactgaatacaatggatttaaacttgcttggtaaaactacctctaataatttaggaatatatttgccttctgtgaaagccatcgcaaagtataaaaatagtgtaagtacaggtatttaggctcacaaaatatcgttatgactgaaaaattggcaaaggttttttgtttgctttgcctcttcgttgagctctctttccgtaacaaatggaaatagaagcacacaaattcaagaaaggaggctctaacagactgaagatattgtggctttcaaaaaggagagaacattttagatgatatgaaggaaatgtcaccccgttactaagaattcactctattcgacagatatatacacgcttcagcaagtgctcctaaggatgagaggagagtaagttattttcatctaacagtctctatcaacactcttcttaaaacacctaatgcttaacaacagtctaaagaacacactggctactcatacctcccataggcagagaccttgtcctttttgagctgctgtatctcaggtaatcagcaatcacttagtggatgataataatttgcaaattcctctggagcctctaaagaccgtatcatgaatcatcaattcaaatgcctacaggagtcgggcaggtgatatgcaggaggaaatagagtcatttagggcccataacaaaggggagagaggccgggcgcggaggctcacgcctgtaatcccagcactttggaaggccgaggcgggccaatcatttgaggtcaggagctcgagaccagccagcccaacatggcgaaaccccgtctctactaaaaacacaaaaaaattagccaggcgtggtgatgcatgcctgtagtcccagctactccggaggctgagggaggagaatcacttgaacccgggaggcggaggttacaatgagccgagatccgcgccactgcacttcagcgtgggcgacagcgagactccgtctcaaaaaacaaaacaaaaacaaaggagagagtacataagccatctccaggctagtttctttaactagtcttcatataataatctcctcaaggtcctgttctatccctacaaaatacaaaacagttcctcgtgtcttccttcaaatatactacagtctttagctcatcagagtagctgagttagtccaaggcataatcccaaaagcgaaactgaatgtcagaattgatctcatttcaacactcattccagaagtaaaaacttctgcaagttcagcttttgactatgaattcttcagcgcgacttttgcagagagctgttccaagaagctggcgccttaacacaagctatctaccgatgcacaaggggaggctggcttgggtccagattcggcgggagagtggaaacgcgacgctggccgacttcagccacaaaggcaatttctgcccagggctagcgttcctaagagggggccgagagagcgccaggctcgggcgtaggggcaagaagacccagagctaacgcacctctcggagggcccaagctcagggctcagtcaccctcccagctcggagccggcgctggaacacagcggcgcgaggagaaacccctagagacagggaaaaggtggacgtagcggctgacgctgcccagacgctaggcgccgacgggagcctgattgtcaccgtacgaccagtgagggggcggggcggagctgtgcctcaaagcgcctgcgcggagagcctgcaatcagggaccaggcttgggaggcgacgaagaggaacgctgggcgcaggaggcccactgcatacgcaggcgcactcggcgatcccggcttttccgcgcgcagttcccgcacaggcatcggggggggcaggggcggggcaggggcggggataaatgcggagggacggtccagctttagctctctgctcgccgccgccgctgtcgccgccacctcctctgatctacgaaagtcatgttacccaacaccgggtaagggggtaggggcggcgcggggagagaccctgtcgggcgaagggcgcgtctcggtggggccgccgcggatcgcccgggctggccggcccggctgtgggaggtcaaggatactgcctgggcacgctctgagctctggtccgcgctgggcactgtgcaccgagaatctgcggtaacgtgtgaaaaggaacacaaacttttgtattacaggatggcagcagtgtagaaaccttttccacgggtaaagggccgagggggagtcaccacgccgcccccagtgccggccctccctgagtttagcaggagtgcgtgcctggccgaatgcgtgtgagttctaggtgaaaggtcgcaggagcagctccagagtttaaagagttttcacttgttcctgacgctcaattctagagtaataatggagtgtttaaaaaatgatttccaaattagaaactaaaccgatcttaaaacatgggtatctttgggggatttttttttcaccttaaaaaattgtgttaaaatacgtacaaaatctgccatcttaaccgttttttaagtgtacacttcagtagtgttaagtagattcatatcgttgtgcagtcaatctccagaacttttttcatctgcaagctgaaactctatccatgaaacaactcctcttccccacctccgmtcgtacattggcaaccaccattctactttctggtttatgtaaggtctgggtatcttgagttgagtgacgtgttgtcagattttgtaatttgcctgaaacatgcaggcatatagccaaagacttaaaacagttcaaagagtatagggtaaaaagtgagtctccccatccctaaaatctagttccccagttacttacgtttctatttcgtgcatgtatgaacataatttgtatacatccggatacacacacacacacacatacacacacacacacacacataccctttcttaaaaatagcagcagactctattcttggtcttgctacttttagttggtatgtcttgggacattctttctttgttttttttaaagacggggtctcccatgttgcccrgactggcctgtagccttgaactcccaggctgatgttcctcccttcttagcctctggagtatttaggattacaggcatgcaccgctgtgcccagggacatacatttttagtacatggcagatcttccgcctcctttttttttcttttgagatggagtctcgctctgtcttccagtctggagtgcagtggcatgatctcggctcactgcagcctccgcctcccgcaattctcctgcctcagcctcccgagtagctgggacttcaggcgcgtgccaccacgccctgttgatttttttgtatttttagtacagacggggtttcaccatgttagccaggatggtctcaatctcatgacctcgtgatccgtctgcctcggcctcccaaagtgctgggattacaggcgtaagccactgcgcctggcccctcctcctttttaatggttgcataatattctgtaacagcttgagtatccattatccaaaatgcttggttccagacgtgttcggatttcagattttcagatttggtttgctcaacctgtatatgaatatacctttgtttatttaacctgttccctattgttggatactagactgtttccagttttttggatactctttttttgcttccataattatacttgtatttatctatttgcacatatataagtgtatatgtaggataaactcctggaagtgaaattgctggatcaaagagtaaatgtggctgggcacagtggctcacgcctgtagtcccagcactttgggaggccgaggcgggcggatcactggaggtcaagagttcgagaccagcctggccaacgtggtgaaactccgtctccactaaaactacaaaattacaaaaattacaaatacaaaaattagctggacctggtagcgggcacctgtaatcccagctactcaggaggctgaggcaggagaaccgcttgaacctggaggcggaggtggcagtgagccgagatcatgccactgccctgccctccaccctgcgagagagagtgagagtctgtctcaaaaagaaaaaagaggaaatgcactttatattttgayagatatttccagatgaccccccagaagggttgcacacccaaaaggataaatgagatcctctaatcccacttgttggctaaccgcaaaatagttaatgatgaaaatctaattagagaaaaaagtgtcacctcattattgttaaaatttgcatttattttatcacaagtgtggatttggatctctttgtgtatttaaaccagggacaatttgatccccagaggacatttggtaatatctcaagacatttttgatagtcacaattgaatggagatgctaatggcatctcgtgagtagagtacagggatgcyggtgcacatcctacaattcacaagcattccgtacaacaaagaattatgtagtccaaaaggtcagtagtgcagaggttgagaaaccctggtttaaagccatctatgtatctttatatttgtctggcttaacaaatgaggtttttcgttaatctctgagggctctgtgtattttaaaaatttgtcttttatcacattacaaatattttccacagtttttcatgttgcatctggactttgattatactgtttatttaacatggagaaacatgtttttgtgaagccagagttatcagtctcttaaggcttttgcatttttgagttaaaccaagatctttttttttttttttgagatggagtcttgctctgtaagcctttgagttaaaccgagatctttctttctgtctttcttttttttgagatggaatcttgctctgtatgcctttgagttaaaccgagatctttctttctgtctttctttttttgagatggaatcttgctctgttgcccaggcttgagtgcagtggtgcgatctcgtttcactgcaacctctgcctcccaggtttaagtgrttctcctgccttagcctcacaagtagctgggattacaggcgcacaccaccatgccggctaatttttgtaattttagtagagatggagtttcaccatgttggccaggctggtctcaaactcctgacctcaagtaatcctcctgactcggcatcccaacatgctgggattacaggtgtgagccaccgtgcctgggcagatctttttataattagttttcttctgatatttttatggtcttatatttttgtatttttcaaatatatttgtattgtctatattttttatagtcagatttttttatccccctgagatttctttcaggaagtgagttaggaagcccacttgatttttcttcagatggctgctcatttgtcctagcagcattgacctaagagttaatcttttctcttctgctcgaaattctacctctgttgtatattaaattcttgcacatatagygctctgtttctggactttctgctctgctactttagtctctattcatgtaccagtaccagactgtttacttaattaattaattgagacagggcctcgctctgtcacccaggctggggtgcattggcaccatcatagktcactgcagccttgatctcctggggttaagcagtcctcccagctcatcttcycaattaggtgggactatagacatgcgccataatgcctggctatttttaaaaaatttttttgtagaggagtctcactttgttgcccaggctggtctcaaactcctgggctcaagtgatcctcctgcctcagcccccgaagtgctaggattacagatgtgagccactctacccagcccaaactattttaattgctctagttttacaaaatgttttaatatgtgggaaagctagttcccaccacatttggattatttttcagaattttcctggttatacttgggtatttatttttccaaatgaagtttagaataatttgtatagttttttggaaacagttgttcttccttttactaaaaatttcagtacttttacctgattttggggtaccagagaattttagtaaattaaactgtaagttagctcttcatcagcaagttttagccatctatcaataatactaagaaatttggagccttctttgaagtgctcttgccttctatattctggtactaatgctttggagctggaggacttcttactggcacagatcagggttatgtttgcttttttttctgccaatgccagagactctgagtgaggaagaaaatgccctttctcctactgggaatcaatcaagctatactcaaagcaaagagatatggcttttttttacagcaatagttgggacattttcttgtaaatacttacattaaaaatcactttagcctgtggtcccagctacttgggaagctgaggtgaatcacttgagcccaggaggttgacgctgccatgagctgttgaggctgttgtggtaaactgaggaccagagagaccgatattgggaagacaggaggatgtttatttaaggtactcaccggctcagtggattcacatccaaaaagctgagccttgaacaaaaacagagtttagcttatataggccagcatacaagatcaaaacaaaggcagtaaattttacagtgacaaatcacgtaatccatagcataactgctgacctggcactaacctgtggccttgcatagctagtggcctagcagctgcatcgaaagaaaaacaggaactttgcaaatcttactaaatacaagcattggcaaacatagtcataactaatagtacaagagagacagtaaaggaaattgtttttcgtcttttaaccttgctcaggggtgtctggagttcatttctgcaggctaggtcaccacgacctgtctacagccttgcttgcagtagtgaaaaacttgtgcaagactgtcaaaagaaaaacacaacaacaacaacaacaacagaaccactttaatattttatgtatactaccttttgtatgaaaaaaggaagggataatttttcacatacatagagtgttttatatatatatatgtttgcttatgtttgaaaaaagtacaaaaatgataggccagaaattaatgaagctggtcacctataggtaagagatcagacttcttttttaaaagtttttaagttttatttatttatttatttttttgagatggagtcttgctctgtcgcccaggatggagtgcagtggcgcgatctaggctcactgcaacctctgcctcttgggttcaagcgattctcctgcctcagcgtccagagtagctggaattacaggcatgcaccaccacacctggctaattttttttttttttgacagaatcttgcactgtcgcccaggctggagtgcagtggcgcgatctcagctcactgcagcctccacctccagggttcaagcaattctcctgcttcagcctcccgagtagctgagattacaggcacctgccaccacgcctggccgatttttttttttttgtatttttagtagagatggagtttcaccatgttggtcaggctggtctcaaactcctgaccttgtgatccgcccacctcagcctcccaaagtgctcggattacaggcgtaagccactgtgcctggccaatttttgtattttttagtagagacggggtttcaccatgttggccaggctggtcttgagctgacttcaggtgatctgcccacctcggcctcccaaagagctgggattacaggtgttaggcaccatgcccggccaatttttttaatttaattttttttttttaaatagtaacatggtcttgctatgttgcctaggctggtctcaaacttgggcccaagcaatccacccacctcagcctcccaaagtgttgtgattacaggcatgaaccaccatgcctaggcctcaactaattaaaaaaatatttttttggtaaaggtggggtctcactatgttgcccaggctggtttgtaataatatattttaattctcttttttaaccccacaagtattattttattattattgtactctttctaaacaagatttctgtacttatttaccaatatctttgattttcctattttcttgaatttcagaccttccatctggaaacacttttcttctgactgaagtgtaacctttagtaaataaggtgtaagacaggaagaaaaagtatttggattataatgaaataaataatgctgtcgttatttgccgatgatattatcctgcacagaaaaccaaaataatgtataactgaattattataattaataaaagtttaagaaaattgctatatataaaagtcaacaaataaaaataattttgagcttggcatggtggctcatgcctgtaatcccagcattttgagaggccaaggtgggagaatcgcttgagcccaggagttcaagaccaccctgggcagcacagtaagactctgtctctaccaaaaaaaaaaaaaaaattaaccaagcgtggtgatgcacacccgtgatcctagctattcaggaggcttagtgggaggattagttgagctgggaaggtcaagtctccagtaatctgtgattgtgccattgcacaccagcctgggcgacaaagggagactctctcaaaaaataatagtaagttagatttctacacgagcaaaaatctgcaagaagtatatagtacatgtcaataaaaatgagaagttcaaaatcccagatatggactccactacaggacatatgatgtatattcttcagcaaataaatggcataaagagtggaagggaagctggcagtgattaaaagagaaactcttaaggtataacagccagatgtaatgtgaggtccttattggatcctgatttgatcaggccaaccataagaaaaactgagatagttataaaagtttgaacatagacagatattgagtgatattgagaaattattgttaattttcttgggtataataatgacattggtattttaaaagtttttatctgttagaaaagtaaatactgaagtattcataggtgaaagtatataacctctgggatttggtttcttttcttttttttttttttgaaacagggtctcactctgtggttcaggctggagtgcagtggtgtgaaatcagctcactgcaacctccgtgtcatgggctcaggtgatcctccaacctcagcttcctgagtagctgggactatgggtgcgtaccacatgcctggctaatttttgtattttttagtagagatggggtttctctatgttgcccaggctggtctcaaactccagggctaaagcgttctgcccacctctgcctcccaaagtgctgagattataggcatgagccaccatgcctacctaggatttgttttctgatgattgctttcacaatttagtagttgaataaacatggaagcttattatactcttttctggttttttaaatgtatttgaaaattccataataaaaagagtcttcgtttttgcactgattgtttattggttgcaagggaaggaatagtaactgtgcagtggagaaatatggtaacactatggttagatgataaaaattgacattataaagtgagtacggatggacgttgtatgctgccctgtgggatatactgaggaaaatacagtatcacatgttctggttggaaatgcataaccggaatctaatcatgaagaaatatcagttgaatccaaaatgagcattcagccaggggtggtggctcatgcttgtaatcccagcactttgcaagaccaaggcaggagaatcgcttgagcccaagcattcaagaccaggctggccaacatggtgagaccctgtctccacaaaaaataaaaaaattagctgggcttgatgatgtgtgcctgtagtcccagctactcaggaggctgaggtgggagatttgcttgagtccaggaggtcaaggctgcagtgagctgtgatygcaccactgtacttcagcctgggtgacagggcaagaccctgtctcagaaaaaaacaaacaaaaaaaaacccaggcacagtggctcatgcctgtaaccccagcactttgggaggccgaggcgggcagatcacgaggtcaggagttcaagaccagcctgaccaacatggtgaaatcccgtctctactaaaaatagaaaaattagctgggcgttgtggtgcrtgcctgtaatcccagctactcgggaggctgacgcaggagaatcacttgaacgtgggaggcagaggttgtagtgagccgagatcgcgccactgcactccagcctgggagacagagctagactccatctcaaaaaaaaaaaaaaaaaaaatacgccaggtgtggtggcttacacctgtaatcctagcactttgggaacctaggtgggtggatcacaaggtcaggagtccaagaccatggtgaaaccctgtcactgctaaaaatacaaaaaaaaattagccaggtgtggtggtgcatgcctgtaatcccagctactcaggaggctgaggcaggagaattgcttgaacctgggaggtggaggttgcagtgagctgagatagtgccactgcactctaacctgggcgaccgagtgtgactccatcttggaaaaaaaaaagtaaggatcattatattttttaaaaaaggagtgcagactgtatttttcaaaaggtcaatatcataaaagacagaagaggctgcaaaaatgttctagattaacggagactaaagagatatgtcaattaaaagcactaccctaaaccgggtcctgtagtggaaggaaaaaatgctctaaagggcattattgagtcaattgacaaaattaaaatactgtgaaagtagatacatgagagaccaagctttgatgtattcagatcactttttttttttttctttttgagacagggtcagtctctgtttcccaggctagagtacagtggtgtaatcatggctcactgcagcctcaacctttgggatcaaacagtcttcctgactgagcctcccgagtagctgggactacaggcacacactgccacacatggctaattttttaattttgtagagacagggtctcactatgttgccctggctggtttcgacttytgggctcaagtgatccccgtcttggtctcccaaattgctgggattataggcatgagccactgcacctggcctcaaatcactcttaagtggtttggagaaaataagatatagagaaggagaaagggagaaggagagaaaatgagcacaaatgctaaatcattggggtaaaatattaacaatacatgaatctgggtgaaggatatgtgagtattttttttgtactattattcttgcaactttaaatttgaattatttacaaataaaaagttggaaaaagttaaaaacaatggagtacctaggaataaagccaacaaaagatgtataatacctttctgtaggaaattatatcataatgaaatacattagaaagacctaaataaatggaattataccatgttcatggattagaacactcactgtcacaaaaatgtcaattctttccactttgaattatagacttaatgtaatttctgtcaaaatctcaactgatttcacttgaccagttagataatgagattctaaaatatatgtgggccgggcgtggtggcttatgcctgtaatcccagcactttgggaagccgaggccggtggatcacttgagctcaggtattccagaccagcctagccaacatggcaaaaccctgtctctactaaaaatacaaaaaatagccagtcatggtggcgcatacctgtagtcccaggtactcaggaggctgaggcaggagaatcacttgaacccaggaggctgaggttgcagtgagccgagatcacgcccctacactccagcctgggcaacagagtgagactctgtctcaaaataaataaataaataaataaataaataaataaataaagtaaaaaataaaataaaatatatgtggaaaattaaaggtccaaatatagacaagaaactcttgaagaagaataaattggaatcatttgccttatcagttattaagactgataaagctgttttaattaaggcagtgtgatcatgtagattagtggaacagaatagagagtccaaaagcagataatatatatatttatggacattcagtttatgacagagctgatattgaagagcagtgggaaagatgggcatttcagacttggacagttggttatctatgtagggaaaaaatgtattagtcccttacttcagttcatacacaaaaattaattccaggtagattaaagaccaaacttattaatttatctatttagagacagggtctcgctctgtcaccaagctggagtgcagtgacatgatcatggctcactgcagcctcgacctcctgggctcaagcaatccttcacctcagcctcctgagtagttgggactacaggtgcacaccaatacactgggctaatttttttattttttgtagagacagggtctcactatgttgcccaggctagtcttgaactcctgggctcaatcgatcctcccatcayggcctcccaaagtactgggattataggtctgagctaccacacctggcctcaagaccaaactttaaagggtaaaccataaaacttttgaaatacaaattaatccacttacaggaaaaaaagaatttcttaagattcccaaagccctggccataaaagaaaagaattataaattctttaacaaattttctaggctggacgcagtgactcatgtctgtaatcccatcactttgggaggccaaggtgggcagatcacttgaggtcaggagttcaagaccagcctggccaacatggtgaaaccctgtctctactaaaaatacaaaaattagccaggcatggtggcacatgcctgtaatcccaactatttaggaggctgaggcaggagaatcacttgaacccaggagacagaggttgcagtgagccaagatcacgccactacacttcagtctgggtgacagagtaagactccatctcaaaaataataataataataataataattttctataatcccagtgctttgggaggctgaggcaggagaattgcttgaggccagaaattaaagatgagcctgggcgacatagcaagaccctgtccccccccaaaaaataaaaaaattaaattaaccaggcatgttggcatgcacccgtagttccaggtacttgggaggctgagacaggagaattgtgatcccaggaataggaggttatactgagttgtgattcagacactgcacttcagcctgggtgatacagaagacccaatctctaatgataaagaatttctgctaatcaaaagacactataaaaatagtgaaaaagcaagccacaaatgaaaagatactgaaatgtatgtaatttatagacttgtatgagtcaataagaaaaaagttaaccttatttatagaaaaacgggcaaaaccagccaggcttggtggctcatgcctgtaatcccagcactttgggaggcggaggcaggtggatcacctgaggtcaggagttcaagaccagcccaaccaaaatggagaaaccctgtctctactaaaaatacaaaatcagctgggtgtagtggcacacgcctgtaatcccagctacttgggaggctgacgcacgagaatcacttgaacccaggaggtggaggttgcagtgagctgcagcctgggcgacaagagcaaaactctgtctcaaaaaaaaaaaaaaaaagaaaagaaaaatgggcaaaaccaattaataggaactttgcaaaagaaggtattgggggaacctgccccaagtatttcaacataggttctttctattttccttaagtgtcggccagctgagaaatagagacagcacaaagagaggaattttacagctgggcctccaggggtgacatcacatatcagtaggactgtgatgcctgcctgagattcagaccagaaagtttttattaagagtttcaaaagagggggaggtgtaagaacagggagtaggtacaaagatcacatgcttcaaagggtgaaaagcaggactacyaataagggtctaacaaagatcacatgcttctgagggaacaggacaaagggaaaaagcagaaccactgataagggtctatgttcagtggtgcaggtattgtcttgataaacatcttaaacaacagaaaacaggtttgagagcagagaaccggttgaccacaaatttaccagggcagagtttttcctcaccctagaaagcctgagggcactgcaggagaccagagcrtatctcactccctcactccttatctcaactgcataagacagacattcccagagtggccgttgatagacctgcccccaggaatgcatcccttttccagggtattaatattaatattccttgctaggaaaagaatttagcaatatctctcctacttgcacatccgtttataggctctctgcaagaagaaaaatatggctctttttgcctgaccccacaggcagtcagaccttatggttgtcttcccttgttccctaaaaattgctgttattctattctttttcaaggtgtgctgatttcatattgttcaaacacacgttttacaatcaatttgtacrgttaacacaattatcacagtggtcctgaggtgacgtacatcctcagcttacaaagataacagggttaagagattaaagtaaagacaggcataagaaattataaaagtattatttgggaactgataaatgtccatgaaatcttcacaatttatattcctctgccatggttccaactgttccctccattggggggtcccagacttcccgtaacatctctccctttctttttatataaatgagccacggcgatgaaggcttgttcrttctcttggttttgacgcaggattcgttgactggtctggcacgctaaaaagtcgattaaacagagaaacatgattccaaaatttactacagtggagcccccaatagacttaatccaagtcgtggggtttagtccagaaagactttctgccacctgacctaacgcctcagctccaggcacaatggataaataagcttgagaggcttcaaaaattattgtctttaatttagttacgtccaaggataaatgatcttccctacccagcaggtgtcctttgaccatttcccatgactcatcagtctcattgtaggaatatggtgtgatacagaaatcagaagtattccagtcacactgcacttgcatgtgatattcgagactcattagccaatctccaagccaaataacagactgtcttaaatcgttaatttgattagctaatttttgatcaatgccctgttgagaattccacatttgggtggaattggcttgccaatcattaacaaaatgagccacttgaatagattggtgtaacgccactctggcagtggtggccagtgcagtgactgtaattaggcccatgatcacagcgattaaagtgaaaacaaatctcttagatcttttgagaatttgctgtagcacttcattaattaaatgtactgagggggaagattcccaaggtctgggtaaagttactggtatccagattccttcttgagctcgaaccaacattacacttttcctgaagtcaaaacaggagttaacacaagtgcataaatgacaatgtattggacagtttgattgttcatccaaattttgatatttcccactaacagcatgtaaggaggcttaacacaactctgtataggaatagtcaggctggaggtaatcaaagcagaatgtttgaatctacgttgatactgagggagaggagcagcgtggcaatgcctgatgttctccaccataaagaagcaatctgaggtgcccagggatgccgaagaggtagaggggcatacctgggtcgagaagaattatcataatgccaattggagtcccataaagggggatcggcgtcaaaaagaggaagagggttcaaaggggatttatcatggggttcagaatcacagatgtgaggggtggtagtggggacaacagacagaaaagtttccccttcccatactcgcagtscggacatggcaatagccaatttccaaagttctgggtgttctgggctcagaatggggaatatcatacaaagcctcagggctggggtgggcgggtaatgcccttatcttctcattttaagggaaagaacgagctgaactacctatggaaagaaggatggtgatcctcgtcctcccaataagaaataaaataagtagcctccagacatcctcttccgccagaggagcaattgttttttaaatagccctttggtgcccagtctattactaaaccatgtgagtcrttttttaatactgctgcatgtgagttaacacaatcttcctaaattaaagttttagatgggccctcaaaatttttaggacatagttttcctatgggtttatattgaaaatatggggtatctcctattactccccctttcatttgtcttaaaggagaaagggagaggccggagaccaaatgtccccattcccctgtggctgatctctccggaaggtaagcagcccagacttgagtttctagatggatacaaccaggtggatgtccgaggcacagaggagggtatttataacccatagtaacattaaatgcagtgccttcttctcctggtcgagtggggcaatggtcatctgtagctccaggcatatatacactatcgttagtatagatttctgcaggagcatccatccagrtgagaggtcgaataagtggaggaaaaggcacataagcccaataagaataattttatgtagcaggtaaatcagtttgaggggaaactggtgagacagaaagtgtaaggaggagaattattaaataaaacctactgtaagcgagatccagtgctggaggaggaagagaagaacagagggatgttattttcaggctaatagaaatggtgagatttttaggttcgtaaggagaaaaagaaaggtaattaggagatgtgggattagttagaggggtctctgttgccatttgggaggactgaaccagacccattttgatttggcctaccagtttctgaggagtcggcacagatctcaccaggtatgagggcagtctctgacgcggacatctcttttctgtggttttcattgtcagtatgcacacgaagtttaagtcttctagtgggcacccagacaggggattgatgatctcctggtgaaacgcaagcataccctcttccccacgttataattgttccaggttcccaggtattggtttgggagtttttccataacactggcttgctttcattgagggagaattttttgcctatgaatagtgttcagcagcattccctgaggaagtactttccattgataatgagctgcaggctcctgattattgatagatggtacagtaaaagcaaattttgacaatctgatttatgtaaagcaatatgaaagaaacagtctttaagatcaataactatgagaggccaattcttaggtattaaaggaggggcaggcatgccaggttggacggctcccataggtttaattacagcattaatggcccttaaatcagttaccatcctccacttccctgatttcttttttactagaaacacaggagaattccagggggaaagaggaggttccacatttccaagttgtaactgttcagaaaccaattgagttaaagcctccagtttttctttagagagcagccactgctcaatccaaacaggtgtttcagatttccctcgtagaggaacaggattaggaggcgtagcagtggccgtcattaaaaaggataacctaaaccagccctgtcttcttttacggtaacttgaagaggtttggtaattccttcatgtcttggactgagaccgagtcctggaacaaaccccatgttttccattatatgttgactgggagcactataagagttatgtggaatattaatttcagycccccattgtgccagcaaatctctaccccaaagattaatggggattggtgtgatatgaggctgaattgtacccttttgaccatcagggctagtgcaaggcaagataaatgtgctctggtgaacttcatcagcttttccaacccctactagtcccattttagtgggatgtttaggccaggaggaaggccatagattagaggaaataatagaaacatcagccctagtatctactaggccctcacacttttttccttgaatgtgtatggtgcaggtgggctgttgtttagaaattacattaatccaataagcggctttttcaccaccagagcccatcccagggccccgtgtcttatctcctttgcttaaaacaatattaggtggtaaaagtaattgagcaattgactcaccagctggaatggaaacaggaaccttggcagacaccataagtttattctcattagaggaatcaaaatgagaccagtatgaaccgtgattcctttagkagtagtggatgtcatacctaacaccaggcccaccgaaccttgaggtaaagggccagaaccttgaggtaaaggccccgtgaggacaattaaagggaaagaattaggtagtaaatttagaggaatggtactacagagattgaccaccccgccccctactgtggaggtagacaagtgtactgagacagaagaagaggctgggacctacctgagttggctgtaggtaagtttgtgtgtgctgggggctgtgttgggaccgcttgaagcagaaatgcaacactggtctgagtctgaggtgtcccatttcatattggggcctgagactggccccgcttccgatttccctggttctgtggcaagggatttccatctatatcagacttagaacggcaagtacttgcccaatgtttgcctttatgacaacaagggcaaacagtagcaggagcatttggctgtgtttgttgagctggcttggctgcttttaagtttttaatggtgcagtttgttcgagtatgaccaagttgaccacagttatagcaggctccaagaaaagaatcagtcgagccggtttgattgccgtccttcatagcccgtgcccasagaatagctttgtgggtccctgatccaatgccttcacaagctttaatatatgcaggcaacacctcgtgatcagctaaattttgtcattggatggcatgcatggccattttacactcatggttcacattcttaaaagctaacatgctaacatacaaaggagaataccttgagcgtgctcatcagagatgaatttttcaacagcatcttgtaatttagccaaaaaatcaggatataattcattgcgaccctgtttaacagtagtaaaagaaacaggagcttgacttggggcacgtaatttatcccaagttctcatacacacctttgttacttgttccatggtgagagcatcaaagcctaattgggaggtagtgtcagagtaattatcggagcctgtgagctgagcctgagtaattggaatgccatcagcccaatttagctgagcctgcagacgggcctcctctcaccaccaggtacggaattgtaaatgctgagatggagttagaacagcttttgccaaaaggtcccagtctaaaggaagcaaaatgacctcagtacaaagagtctgtaataccattttaacatatggagaagtaggaccatactgagtacaagcatccttgaattcttttaaaaaggtaagattgagcggcctaaatcaatgcacttgtaccccttgagcactgggagattccagcacgaccggataagccgacacctctaatccacttgtttcttttttctggcgtaataagtgttgcatggaagtttcaagaacaggcacatgasatggactcggcatagaaatgacaggaaaagtatgtgtagataagggaaactgaggttgaggaggtcggactggtatgagagtatgagaaaggggcattgggggagcagaaaaggcataagcatactggtgattattggctcaatcctgtgcaaccagagtggcaggggcatccacgtgtgaagaagggtacagagaagcaggttgaatggatggcaaagtgaccaaatgagggacygaaatgacaggagagtgaggggctgtggtggatgagggagggcctgcagaattacaggtaaattgtagtttggttccggagccatcagatggctccggaagcaaaggctgcaaaggtttgaagagggaagagttagtatagatatggtcctgggctgtccaagtygggtccgtgggagctacaagtaccggctcctcatgaaaagaaataagatcattgggggtgacgttaagccaaagtcaccagagttagatattgagtcctcaatatcgtcaggtaggggaggagttggtgaagggagaggcttgagcagataacgaaggccgaacgggagaggaaacctgaggaagaggtagagggtcaccagacacagaaaacwgtggtaactgcagggggttacaggattggtattttaggacagcacttaccaaggcccaatcaccccaaacagtgacgggagcataatttcctgttgggaccagttcctggaattttgcaccaacatgatcccatagtcccacatctaacattcccttttcaggaaaccaaggacagtgttcttccactgccctgaataggatgtccatattttccataggtacctgaactcctccctgttttaacaggagtttaatatagcagagataagcataatgcttagacttcgtgtgacccatagttaccccggacaatacacagacaactcaccaattgtcagggagccgaacaagcgtttctgtgaaccggaccaatgaacgtttctatgcacgtaccaaaaggaatcgggttcccacatgcacttaggaaaaagccacttggcatgccagatattgggggaacctacccctaatatttcaatgtaggttctttctattttctgtgtcagctagctgagaaataaagagagacagtacaaagagaggaattttacagctgggcygccgggggtgacatcacatatcggtaggaccgtgatgcccacctgagtctcagaccagcaaggttttrttaaaggtttcaaaaggggagggggtgtaagaacagggagtaggtacaaagatcacatgcttcaaagggcaaaaagcagaactactaataagggtctaacaaagattacagggcaaagggcaaaaacagaaccactgataaggatctatgttcrgtggtgcacgtattgtcttgataaacatcttaaacaacagaaaacagggttcgagagcagagaaccagttggaccacaratttaccagggtggagtttttccccaccctagtaagcctgagggcactgcaggagaccagagcgtrtctcactccttatctcaactgcataagacagacgttcccagagtggccgtttatagacctccccccaggaatgcattcctttcccagggtattaatattaatattcctcgctaggaaaagaatttagcaatatctcgcctacttgsacatccgtttataggctctctgcaagaagaaaaatatggctctttttgcccgatgccrcaggcagtcagaccttatggttgtcttcccttgttccctaaaaatcactgttattctgttctttttcaaggtgcactgatttcatattgttcaaacacacatgttttacaatcagtttgtacagttaacacaattatcacagtggtcctgaggtgacgtacatcctcagcttacgaagataacaggattaagagattaaagtaaagacaggcataagaaattataaaagtattatttgggaactgataaatatccatgaaattttcacaatttatgttcctcttccgcggctccagctggtccctccgttcggggtccctgacttcccgcaacaagaaggaacacaagcgaccattaacatgggaacaaaaatatattccacctcattagtaactggggaagtgcaaatgaaaatcaccttgggatatcatttcataatactgaattggtgaaaaaactttaaggtcagaaattaccaagtgttggggaggtggtggagctacgggaactcttatactcattcactgctgctggtaaggatattatcctctttgggcagggcatggtggctcacacctgtaatcccaacactttgggaggccgaggtgggcagatcatgaggtcaagagatcaagaccatcctggccaacatggtgaaaccccatctctactaaaaatacaaaaattggctgggcgtggtggcgcatgcctgtagtcccagctacttgggaggctgagtcaggagaatcgcttgaacctgggaggcggaggttgcagtgagccaagatcgtgccactgcactccawcctggkgacagagtgagactccgtctcaaacaaaacaaaacaaacagaaccacaaactggatggcttaaaacaaatggatgctctcactgttctgtaagctagaattctgaaatcaagatgtcagcagggctgtgctgttgtagttctgggtagaatccttccttgcttcttcccagcttctgggggtggccagcaatccttgtgttcrgggcttgcagctgcatccctccaggctctctgcctttgtcatcacacattctccatgtggctgtctttacatagtcttccttcttcttagaaggacacctgtccgattggagtaagggcctactccaatatgacttcatgttaactaattacatcttcagcaatcctggttccaactgaggtcaccttctgaagttaggacttccacatgctttttgggggacacaattcaatcaataacagggagataaggccggggttatcttcctgttattgattgataacatcccttgctgttatcttaattttattcttttattcttttttaatgagtttaccaggaagttattttagatgtctccttcttacttagcaagtgagtaagtaaaaagtttaaatgaacttaatttaatgctaataatcccagcactttgggaagccaaggcaggaggatcgcttgagcccagttcaagaccaacctgggtgacatagtgagaccttgtttctacaaaaaattaaaactttttcaggtgtggtagtgcacgcctgtagtcctagctacttgagtggtgaggcagaaagatcacttaagtccagaggcagaggttgcagtgagccacactccagactgggcgacagagcaagaaccgctctcaaaaaaaaaaaaaaaaaaaaaaaaaagtagcagagagctaatgttttacctaattgggattcaaaattagcattccttgtcatcgaattgatcacaaatactcatctgtaacaatcaatcttagctccagggccacacacagacaggtggtgggtcagatttggcctggggccatagtttgcagactgttgatttagactcagagacctaggtactaggaataatgaaaaaacaagggagtgcataacatttaaggtagttttcgttctgtggggtgggggagggaaggaggatagagttggagaggaatatacaggctggtttctggggtattsgtaatattctatttcttgccttgatactactgttcattttaattttgttcattaaacaatacacattgttttacatgctttttatatgtgtgctatatttcatgaaaaataatttcaacctctctgacttctccccacttctccactctccctccttcttaccaaacaaattattccttattttaaaaccgcttcccacttttacctctgatctctttcttctggagtgtaatcctctgggtcgtgcaagagttttatgttcctttattaacaaacctgttaatctatcaccaatctcaggtcatccctttttctttgtcattgtcacttttgctcttctttctccattcttttccttaagcagacttttaaatttgcccttagaaagtaaataagaaagcgggtttcccttgctgttatctttattttattcttttagtttttcttttatgagtttactaggaaattattttaggtgtctccgtttcacttagccactgagtaagcagaaagtttaagtgaacttaatgaaatggggggaggccagggtgggaggatcacataaggccaagagtttgagacctgcctgggtaacataccaagaccctgtctgtacaaacaattttaaaaagtaactgggtatggtggtgtgtgcctgtagtcccagctacttgtgaggctgagatgggaagatcatttaagcccaggagttcaaggctgcagtgagccatgattgcgccactgtactccagcctgggtaacagagctgtcttaaaaaaaaaaaaaagcacgtaggagttcaaggccagcctgagtaagatggtgagaccccatctccatttaaaaaaagcaaaaaacaggctagccgggcgcggtggctcatgcctgtaatcccagcactttgggaggccaaggcgggtggatcacgaggtcaggagttcgagaccagcctggccaacatggtgaaatcacgtctctgctaaaaatacaaaaattagctgggcgtggtggcccatgcctgtagtcccagctacttgggaggctgaagcaggagaattgtttgaggctgaagcaggagaattgcttgaacccgggaggcagaggttgagtgagctgagattgcaccaccgtactccagcctgggcgacagagcgagactgtgtctcaaaagaaaaaaaaamacacacacacacacaaaacacacacacacaaagaatgaaatgggcacagggacccatcagtacatttgaatcagaatatttcagatcaacctgcagcaatttgtgagcgtttgtttatttaacagctcttttgagatgtgattcacgtaccccactatgcagtcatttaaaatacgcaattcattggcttttaatatattcacagagttgtgccaccatcaccacagtcaattttaaaacctttaatcatcctagaaggaaacccctcaaccctccgttgtcagcctccaatccctcccactcccagctctaggtaacctctgatctttctgtctctataggtttgcctattctggacatttcatataaatggcatcatatgtggtccttcatgactggtttcttcctcttagcagaatgtttttggttcatccatgttgtagctcatagcagtactttattgcggaacattatttcattgtatgcgtggctacaccacattctgcttatccgttcatcagctgatggacgtttgagttgtttccaccttggctattatgagcattcattgaacaattatttgcttttaggtaatttattttaagtggtatgtagtcattgtggaaactttgaaaaatattaaagaatataaaggatgtgataaaatttgctcataatcccaccactcaaaaaaaaaaagctttattaacacgttttctgtggggaaaaaaatgcatgtttatataatttgttttataattctttatttctcttgaagatttgctttgcatttgaacagattttgtttgctaaatcacagcaagactggccaactgcagttgtcataaataatttatcagtcattgtgcaatgggagtatagtggagttatctgccatcagatgggcatggggagggtttagagaaaatttcacagaggaggaaacatatattatgaaaatatgcatgaggttctgatacctgtcagtaaataaaacattgggtcttctaataaggtcgtatttgttctgttgtaggaggctggcaggatgtacagtttttatcacaggtgcaagccgtggcattggcaaagctattgcattgaaagcagcaaaggatggagcaaatattgttattgctgcaaagaccgcccagccacatccaaaacttctaggcacaatctatactgctgctgaagaaagtgagtgtgacagtgccatttgataaaatgtctttctagtggtttcaatacatagagaatttgctggagagtttagttaaagctatttgaaagctaccctgaacataattttatctagtgaaagaagtatttatgttgtcaccttggggcagtgcttctgaccgtttttctccaccagcacttttaagcaatgtgagaaactccagttaaaaatcttatttcatggcggggcgtggtgactcacacctgtaatttcacccagctactcgggaggctgaggcaggagaatcacttgaacctgggaggtggaggttgcagtgagccaagatcatgccacagcactccagcttgggtgacagagcgagactccatctcttaaaaaaaaaaaaatcttggttcttgagggcagtggttcttggatgggagggggagtagggaagtggagtagagaggagagaatttgattggtgagtggcatgaactctttgagaaagcgttctgtgttatttattctctgtacaatttgcaagtcatcattttaatacttttagttgacaaataattatcacatacttctatttaaggcatagcgctaggcacagagccaggagagagggcttaaaaattcaagttcagttgacattgctagttttgttaatcatgttcagagcactgtggttatgttagaggaatgcatgtgaagtgttyatgagtgaaatgatgtcagggatttgctttaaaacacaccagcaaaaaataaaacgggacaggaaagataaacatattaactgacaaaactaacaatcgttgaagataggtgatggattcctgttagtttattacagcatctttacatttttatatagtttagaatatttccacaataaaaagtttttaaaaattactttcaactgggtgaggtggctcawgcctgtaatcccagcactttgggaggccaaggcgggtggatcacttgaggtcaggagtgcgagaccagcctgaccaacatggcaaaaccgtgtctctacaaaaaatagaaaaattagcctggcgtggtggtgcatgcctatagtcccagctacttgggaagctgaggtgggaggatcctttgagcctgggagattgaggctgcagtgagctgtgtttgtgccacttcacccaagcctgggcaagagagtgagaccctgtctgaaaaacaaaaacaaacaaacaaaaaacttcctttttttagctttttaaaaaaattacaaagaaacccccaccaaaccttcgtttttgttttttaatagtgttagcctagctagtctgtcctgctatatggtagagtcactggtggtaagatagagttatttatattgattttctgaaaacagggtacttttttcttttgactgtgatattggaattaaaggtataatatttaaatgctttaacgctttttcattttgtatcctttatataagttgaagcagttggaggaaaggccttgccatgtattgttgatgtgagagatgaacagcagatcagtgctgcagtggagaaagccatcaagaaatttggaggtaataccttcattctgaaaaaattattggatattggtaaaataaaggtataactataatgttaatttaaaaatttgttttgagttttgaattttctgagtctttggagaaatacgtatttgctcacacagaacatgatttaaaaccatctgataaggctgggcgtggtgrctcacacctgtaatcccagcactttgggaggccgaggcaggcagatcacttgaggtcaggagtttaagaccagcctggccaacatggtgaaaccccgtctctactaaaaatacaaaaattagctgaacatggtggtggatgcctgtaatcccagctactcaggaggctgaggtggaagaattgcttgaacctgggaggtggaggttgcagtgagctgagattgcaccactgcattccagcctgggtgacagagcaagactctgtctcaaaaagaaaaaaaaaaaaaagaaaaagagtgtggaatgatagactgtggagactgggaagaaagaagggatgcaaggggggtagatgaagagaaattacttaatcggtacaatgtttgctgtttgggtgatggataccctaaaagtcctggacactgcacaatctatgtatgtgagaaaattgcacttgtgccttatatatttgtttttgaaaaaattcttcctttatgtggttaaatctcatcttcttcacaaagtcagttccctcaccatgccaactaatcagaattatatttttctttctctgatttcttttttctttttttttgagactgagtcttgctcttgtcacccaggctggagtgcagtggcgcaatctcggctcactgcaacctctgcctcctgggttcaagcgattctcctgcctcagcctcccgagtagctgggattacaggcgcctgccaccatgcccagctaatttttgtatatttagtagagacaggtttcgccacattggccaggctggtctcgaactcctgacttcatgatccacccaactcagcctcccaaagtgctgggattacaggcgtgagccaccgtgcccggcctctctgatttcttaaaacattcatttgatccttatcttgtactattttagatcttagtatttcttttctccccaattagttcaaaagttcctagaaaaaaggtgttggggattgagctaaggctttcatggtattatagtagggcacctaggcatgtccaaatcctgcctaaaccattaccactctccccgctaatgttctggaggaccatatgtacatgtgagggacaatggccagtggaaaatgagggaatgcttcagtgttagcaaggctgtacttataatcccaatgcagagtgctgtggggtgctggactgaagcacggagctttggctcaagtggagcctcttcccttaartccaaaatcttacccctagccggcagcctttcccaaagaaatgtgaatgcctgtgtcagaagaggagagaaaatgcaaaatgatgtttgtccaactgatagggcgctaaatgtgaaatgtgccacgctcaaatgcaggatattttatctaaaatgacttcacctagtagtaaaagtggttaactagtgccacttaggatttgatgtaattagtttatccactaatttttggagaggacgtaaggggagaaagctgaagcttttcattctcccatattcattcagttttagttcttttttttttcttctttgaaacagggtctcactctgtcacccagactggtatgtagtggcatgatcgtggctcaccacagctttggcctcctgggctcaggtgatcctccaaccccagcctcccaagaagctgggactataggtgcccaccaccaggcctagctaatttttgtgtttttagtagagatggggtttcaccatgttggccaggctggtctcaaactcctgacctcaagggatccacccacctcaacttctcaaagtgctggggttacargcatgagccactgtccccagccttgaatttattatttaattttttaaaattgtggtaaaatacacataacataaaatttaccatcctatttttaagtgtacagttcagtgacattgaagtttattatattgttacacaaccatcattaagtacacttcacaaagaataatgaagaccaggtagaaacaaagaaaaaatgtttgacatagtttttgtatttttaccattttcctttaatgttatttcactaagcatataactataagcaaaacttgttggttataggtagaaactagatmgaatttgcagaaatagtagttactctaggtttattttttktgtgtgtgtatgagtcactaaaacaaaattgatccactttgatgatctgcctgggattgaaacagtaggtctttctcttttcccagttctcaagaccagaaaggagcctttccctttaagtgaggggccttgggggaagggagactactatgcttggagggaggacaggcctttgaaacttcatgctagagaggaagaaagactttaaggaatttgatccaaggtttatggagacagggagggacaaccaggaggtaagagaacagttaagagtggaagctacaaaccaccgaagactaagcctccttgtagtttcacatggagctctggcaattggctatatctccactgtgctagtgacaatcatgcaggtgctattttgaaatarctaccagtcttgcattggtagtggttagtcatattatctaaaggaagtatagccatgcattgcttaatgatggggatatgttctgagaaaggcattattaggtgattttatgatcgtatgaacatagagtatacttacacaaacatagatagtctagctgaccacatacctaggctgtatggcatagcctattgcttccaggctgtaaagctgtataacatgttactgtactgactactgtaggcgtttgtaacacaacagtaagtatgtatctgaacaaacttagacagaaaagagataaaataaaaaamcagtattgtaatcttaagggaccatgttgcgtatatgggccattgttgactgaaatgttaggtgtggtacatgactgtatttgtgaatcaactgagggttcaagagagtaaacgctttttttgtgtgtgataaaaagtctttcattaaaatgaaattgattattttgaaaacaggaattgatattctggtaaataatgccagtgccattagtttgaccaatacattggacacacctaccaagagattggatctgatgatgaacgtgaacaccagaggcacctaccttgcgtaagtttgcaagaagagttgttggggaggaagttgcggtgtttctcagggaacttacatagttgtaaacagatttgagccaaattaacagtgtagttcaaaatctagtcaatccttataagggtctaaaagtccttcattcagtcaatagtattttattttattttttatttatttatttttttgagatggagtttcattcttgttgcccaggctggagtgcagtggcacgatctcagctcactgcaacctttgcctcctaggttcaagcgattctcctgcctcagcctcctgagtagctgggattacaggcgcccaccaccatgcccagttgattttttgtatttttagtagagacagggttttaccatgttggccaggctggtctcaaactccttacctcaggtgatccacccaccttggcctcccaaagtgctgggattacaggcatgagccaccatgcccagcccgatagtattttaaatagctttatttggagctccttttctctatgaatttaggaaagactaaagtaggctgagtgcagtggctcacacctgtaatttcagcactttgggtgaggggagtattattggaggccaggagattgagactgagatgcacaagatggcaagacgctgtctctacaaaaaaaagtttttaaaatcaggcaggcatagtggtktgtgtgctactgagactgtggtggtggtctcatctactcaggagactgaggcaagaggatcccttgagcccaggagtttgaggctacaatgagctgtgatcatgccactgcactccagcctgggtaacagagaaagactgtctccaaagaaaaaaaaaaaagactaaagtgtagctcaagcattttctcaaatatttgcatgtgtaaatacttacatgtatactctgtctttcataggacacagtcctttcataggactatttaggattactgaagccagcaatagtctccttcctctgaaaaagacctggcgttaaaaaaaaaaaaagacgtaggttttagttatttaaataacagtaaggtcattctcattatgaatcacactttattgtaaccaataaaaacactaatactttcttgggctttgccggggaaatgtagactatcgaatgaaagaacatagtcttgatctgttctggattcatcagacaacctgtcttattgtccatttatttatctgtttatttaccctctggttctatattttccatgtggatatcaggatacatcaggttagaacttgcttctgtaccttacatgtatcttgttaacacacagaataggtggttaggagcttaggctctggagtaagactgcttggattcaaatcttaacactcacccctcatgactttctattttgtgaccttggacaagtaacttaacttcttgcagattcagtttctttacttttaaaatggcaataatacagtaatatgttatagggttggtcacgagggttaaatgtctaagttattaagttagagtcctgaatttttccctcaggtatgttttgttgggtctgcaaaacttggcccagacagtgttaaaacaaaattgttttcattagttacctacattcaaagttttattagttagggccaggcatggcggctcatgcttgtaatcccagcactttgggaggctgagccaggcgggtcacttgagcccaggagttcgaaaccagcctagacaacatggcaaaaccctgtctctacaaaaaatagaaaaattagctggggatggtggcacacgtgcctgtagtcccagctacttaggaagctgaagtggggggattgtctgaatctgggaggtggacgttgctgtgagctgagatcaccctactgcactccagcctgggtgacagagcgagaccctgtctcaaaaactttattggttgcttatgttgaaaaaattagaagatttatacaaaagtccagatttctagcttttcttgaaatcttagaagatctggccaaatagagaagcattaccacatggcaatagttgctgtagctgagtggcagggttatcaactgcctcatcagatggggccagagctctgttgtcttctggatgctgaggacagactaacaagttatatcattgcatttacactgttgtttttcttatatgaaagaggaaagtgaaatatttctcataaccacatctctctctgaattgggaaaatgagacttatgccaagagggccgtatgttcaagcaaaatgggtgaaagcttacttgtttgtagatgtaaggcatatttctataaattcgatatgtaaggtaggtctctattgaatgaaaccatattgaatccaactgtagtaagaattatggcaaatggctgggcacagtggctcatgcttgtaatcccagcactttgggaggccaatgcaggcagatcacctgaggtcaggagtttaagactagccaggccaacatggtgaaaccctgtctctactaaaaatacaaaaaattagccaggcgtggtggtgtgcacctgttactggactattccggaggctgaggcaggagaatcgcttgaacccaggaggcrgaggctgcagtaagccaagatcacaccactgcactccagcttgggcggcagagtgagactctgtctcaaaaagaaaaaaactattatggcaagcatatagattgtgatgaaaaacttgaactagaaagagtttgtgtttattttcaaataaaataggcaatgttgctatgtgatactgtcatggtactagaaaaaattatatgggaataaaaatattttacagctggcaactttgtgaaagaatttcaattgaatgttaagtatttgtttaaacaaatgcttaaaaatataaacctagccaggaatattattgctcaacatgttgaactaaggcttagttaagggcgtgttgtgtgaataagtttaatgatttctggcagtttctattatagatgatgaagccacagatatacatatacaggttgagtatccctggtctgaaaatcccaaatccagaatgctctgagatctgaaactttttgagtgctgactcgacgctcaaaagaaatgctctttggaacattaaggatttcaaatttttggagtagtgatgttgaactggttaagtataatgcagatatttcagaatgaaacctgaaacaattctggtcccaagctaaacttgtaccacacacctaggtatatggcgtcaggagaattttgacgtgattaaaaaggttttagactgggttttcatgacatgaaatgacttccaaggtaytgacaaatatcttggcaagtttaaggcagatttatcaaaactagtaatcataactatagacagtgctgtagcagtggtcagtgttaattttagacttattaaaatctaaacaaatgtaggtatatgttttgcaggggtgcagaaattgtttgttcattgtatcattcactaggaattgctccctactaacaaagttaaaaatatacgttttctttccaagagatgatcaatacaagtaaagcattgaattttatgtagatttgtcaaaattagtaatcataactatagacttgaccttttaaactgacattatgactgatgtgtacataaatgtataagtctctttgttttttccttgtgaaattatgtctttggaagcccatttggcaaaaataatttggtctactttcctatattgaggtcatttttcaaaaatgaaagtgatgtcttaacccacatttttagatgtgaaggtgcaattaaaaacaaaacagaccaggtggggtggctcacgcttgtaatctcagcactttgggaggccgaggcaggcggattacttgagcccaggagtttgagatcaacctgggcaacatagtgaaccctgtctctgttttaaaaaaaattacagttaaaattaaaactctcgcacaaagattctattcactattgaaagttcctacctttataaacagccacttaaaaaaaaaacactaaataaaattaaatattgctcccagttaaaagcagattgaaatgccaaatgaaagacctcacactgacttttgggtcaaagaaaagtgtcagatttttggccttctatgaaaagtatgttataaaatgaaaattcataatgaaatatttctattttggccaggtgtggtggctcacgcctgtaatcccagcactttgggaggccaaggcgggcagattacatgaggtcggaagtttgagaccagcccgacgaacatggagaaaccccgtctctactaaaaatactaaattagcaaggtgtggtggcacacgcctgtaatccagctactcgggaggctgagrcaggagagttgcttgaacccaagaggcagaggttgcggtgaaccaagatcacgccattgcactccaagagtgcaacgagagcaacaagtgcgaaattccctctcaaaaaaaaagaaaaaaaagaaaagaaatatttctattttattttatttttacttccctggtaactcacagaacacatttcttttttaatttgtatttttcaatttaatttattatatactctccagtattacattgtttgtatcatgttaaatgcttttagaagcttagtagtaaggttcagttgtatctctgaacagttgatttttcttattcccagctgtttgaaatgcttgttccctggtgccataaagaaatagcacttgaacataaatttaatttactcagcaaggccgtttttatactttctgcagaaagggtatacttgccagcagttttgccacaagagtacaccgatcaaagcagacagggtcatttataacctgacgcgtccaccctactgctgtgtccggtttccattggctggaacgggacctgacgttctgtatttgtcccggttggctagcaacttagaactttttttaaaaagaggcaaaggcagaggagaacaaaggaaggaggaggtaacttgtggaatgctgagaaaggtaaaaacaccttcaaataaggaagaggaacaggctatgacctaatgcttgcttggaccagtatatgcatgccagggcaaatatttaggctaaattgtgggagctaagaacttaaagtacattgatttctttatcatggctagcagatatttaagaatgttagtacgggtctttgaatacattttgcttctaagagaagttactatttattcctaattagacagggaggaaagtctttgaagaggaacctctagtttttacaccaactcactttattcatttactcaaatgccttacaggtctttgagtttgaaaccccaagtaagtaaaataattcatgaaaggtaataaaaacagagtctggcacatagttaggttttcagtaaacgtaactattttattcggctgaaggtatcagtatctaagtgtggtgctaagagttttcaatataatatataagagggcatgctactgtgacagatgcacctgatgtaggattagcaatgttgaggtccaggccagcaaagtgcagatggaaaggtcttgtcccatagatcaaaggaaagcccatgtttagaatgtaaatgaaatgagctctttcctttgagtgtaaaatatggtcttatttactggagtagatttagtttgtttcttcttgatgcttcgagttgcagtttcactgttttaatgaaactcagctgtaatattgtttgccccacctcacctcacctccataaaagtgaagcacctttggaaatgaaaacagtatctaccaaaacccctctagtggtattgattatatttggtaagcttggtaagatgttgctgtttttaacaccagtattgtacatttggtaattaaaaaactgacttgaaagaagaatgaactagttcattcacagctcctggttcagggtaaagaaaaaaaaaagaatggacaagttcagagtcctagaagtcctagaagtcattgaatgtaaacgaaagctaaatttgtagctaaaataaagctataaattaagctataatatattatttagctgctgacattatgtaaaaattaacattttagaaatattgaatctgaatcttaaataaattacctaccttaatgagtgactttttaaaaataaagctatgtattgcacccaaaggcatattttatattggtgaaaattaaatttgggaatgtaatgagagttatattactaaattacagttccaatgtagtagaagtactatgcctattaagatgaaataaatcagcatacataatactaacaacagcgattgtttatttcatgtttagtatatacattgtcctaagtatctcatatatatcatctaattttaatctcttggtcaatcatagaaggtagtgacttttaccaacatttgcagaggagagaactgagcattagaatgctatacaattttcccagggtcacacaatgaaggggcagaagcagaatttgaaccctggtctgtctgacttgaacactcatgttatttaccactgtgctgaccgacaagtatattaactatctctgaaaattacatatgtgtgttagggaggcagaatttgggatggttgtggttgcggataacctcagttgggcttaaggctagtatatcaaggatttgtttttttccatcaagcagatcatgttgccaggccattaagcagaatttcaaaggatgaaaattagttgmtttttctgtcttaattctagaaagcaaacaaaagtaccctatgaacaaaacaaacaaacagttccctacagatttctgagcaagttcagttactctgtaggagtagtttaaaatgtatcttggcggagcgtgggtggatcacgaggtcaggagtcgagaccatcctggctaacacggtgaaaccccgtctctactaaaaatacaaaacattagccggacgtggtggcgggcgccttgtagtcccagctactcaggagactgaagcaggagaatggcatgaacccgggaggcggagcttgcagtgagcgattgtgccacttcactccagcctgggcaacagagccagactccgtctcaaaaaaaaaaaaaaagtggattggcccggcatgatggctcacacttgtaatcctagtactttgggaggctgaggcgggtagatcgcttgagtccaggagtttgagacacgcctgcgccacatagcaagaccctgtttctaaaaaaagaaaaaaaaaattacaaaaactatccaggtagctgggcatgctggcacatgcctgtagtcccagctactcaggaggctgaggtgagaggaccacttgagctggggaggcagaggctacaatgagatgtgatcatgccactgcactccagcctggcaacagagagaccctgtcttaaaattaaaaaaamaaacaaacaaaaaaaaagaagttggctggtcgcagtggttcacacctgtaaacctataatcctggcacttcgggagtctgaggtaggaggagtgcttgagtccaaggggttcaagaccagcctgggcaacaaagctagaccctgtctctaaaaaaaaaaaaaaaagtacagaaattagctgggcatggtggbgcacacctgtagttccagctactcggaaaactgaggtgggaggattgcttgagcccaggagcccaggagctcaaggctttagtgaactgtgatcgagtcatgcactccagcctgggcaacagagcaaggccccctctcttaaaaaaaaaagtggagaaattgttagaaagctattaaatttggcttgtattttcttttgctttcagatctaaagcatgtattccttatttgaaaaagagcaaagttgctcatatcctcaatatcagtccaccactgaacctaaatccagtttggttcaaacagcactgtggtaggtggtaggtggtagggtgaggggatggtttgtgcttaatttgttttgaattaaatctgtgtatgtctgatgtaatcacaatctgcacattaacattcatcattgaattttctatgccaagtcattaagtggcatttggaaagtagattcttcatcttttatctgtaatttaaaaaattgaggcataattgacattcaataaaatgcacagctcttaatggttcagtttgatgagttttgagaaatgtatataaccaacacccaaatcaagatacagatttttaccatttcagaaagctctttcatttcccaatgagtgtgttttactgtgtgtaatttattcatctataaagttggttaaaaactatctatgagatactttatttttcttagacaggtatgcacctgtagtcctagctacttgaaaggctgaggtgggaggatcgcttgagcccaggagtttgaggctgcagtgagctaggatcatggcactgcactcctgcctgggtgacagagcgagaccctgactctaaaaaaaaaaaaaaaaaacgacaaaaaaaccctattacctttcatagcaaactaatggtttaaggtaaatatgctaagcaacaagatttacatatagatgcctcctttaaaatagttgtatcaaacacttagtttttatttcagcacagttcactaacatttggaaaggcacttggaatgggaacccacagagcaaaactgaaagaagttccactttaattgactaggttaaatacatttgcagcctttttttattattgttttactagcagtagtttccctttaaataaacactttcattcttaaaaaaaaaaaaaagtccaggcatggtggctcacatctgtaatcccagcactttgggaagccgagacaggcagatcacttgaggtcaggagtttgagaccagcctggccaacatagtgaaactccatctctactaaaaatacaaaaattagctgggcatggtggtgcacacctgtaatcccagctactcggaggatgagrcacaagaatcacttgaacctgggaggtggagtttgcagtgagccaagattgcaccactgtgctccagcctgggcaacagagtgaaactgtatctcaaaaaaagaaacatattaagagataataatgtaatttaccctcatagtattaagaaaaatgaaagtttattactgtcacttttattttaatcaatwaggagggagatatataaaatgatttcatctctgttcacttctataaaacctgttctttacaaaatagtacagtgaaaagttatattttatattattgaaaagaattctcaaaaatatatcagggaggctgggtacggtggctcgtacctgtaatcccagcactttgggaggctaaggcaggtggattgcttgagcccaggagttcaagaccaggctgggcaacgtgcaaaaccctgtctctacaaaaaaattgaaaaattagccaggcttggtggcacacacccatagtcccagctactcgggaggctgaggtgggagggttgcttgagcccaggaggtagaggctgcagtgaatcgtaatcacaccactgcactccagcctgtctcaaaaaaaaaaaaaaaagtatgtgtatatatatgtatatatgtatgtgtgtgtatatatgtgtgtattactattttcttcctgatatatatgtgtgcgtgggtgtgttgtatgtatatgcatatatatacacatgtatatgtatatacacacagatatatacacatacatatgtatatacatacatgcacacatatatcaggaagaaaatagtaatagaaaaattggttatttctactcacaagttaatcaaattaatttcttttataattaaattattattttttgtggttctttcagcttataccattgctaagtatggtatgtctatgtatgtgcttggaatggcagaagaatttaaaggtgaaattgcagtcaatgcattatggcctaaaacaggtatgtatttttaaaaacttcatttgttagattttcatgtattgtccttgacacttattattattttttgacagaatctcactcttgtcatccaggctggagtgcagtggtgtgatcttggctcactgcaacctctgcctcctgggttcaagcagttcttgtgcctcagcctcccaagcagctgggactataggtgcacaccaccatgcctggctaattttttgtatttttagtagagacagggtttcaccatgttggccaggctggtctcgaactcctcaagtgatcctcccaccttggcctcccaaagtgctgggattacaagcatgagccaccacgcccggcctgtccttgacactcttgaggtgcatcttgggtatgatagggtgagagtatgtagactgttaatactaacttcaatctgtttgttgggaaacaagttcaactttttattgtacaacataagatccttttcaatcatcttcctgccttggcttagactacatgagtgactcttcagccaatagcctttgtaggaacattgaccaccggaacactttaagaatcttttgaaggccaacaggagaagctgcacttccccaactctttctccatctttgtttctggaaactacctaaattctgcagattctcatacttttgttttctcctcacacattctaacaaatgctttttaacatttttgtattcttactggccttgtctttttcctttagaaaaagctggattatctttcctttcacatgaattcttctgaattcacagagtacctggaaccctgtgagatgacagaagaacctgtgtatgcctgggcttggtgtgcaaatttacagttatgatataacagaagttgatggcttccttgctgggcaataagatatataaaaatgagggaaagccagcaaaaatgagaaaaaaggaaagcctgtctttcttataggttcttaccctctgcytgtatatcagagtagcttaaaggaagaaaaagagacgataacatttcactacacatttttccatgtactagtgggtaatgcccatgaaaaccttaacttctttttatcttaagtgtaaatggtgccgggtgtggttacagatggctcatgccatcccaacactttgggaggccaggatgggcagatcacttgaggccaggagtttgagacaagcctgggtagcatggcaaaaccccgtgtctactaaaaataggataaattagccagttacttgggaggctgaggcatgagaatcacttgaactttggaagcagaggttgcagtgaacccagattggaccactgcactccatcctgggtaacagagcaagaccctgtctcaacaacagcaacaaaataygtaaatggcaatcacatcgcagaaaagtatgtctaatgataaacagtatgcagagggactgggtgtggtgcctcactcctgtaatcctagcactttgggaggytgagattggatgggaggattacttgaggctaggagtttgaaaccagcctgggcaacatagtgaggcctcttaaaaaaaaaacacacacacaaaaaaaacctagctaggtgtagtggtgcacacctatggccccagctgagatgggaggatcacttaagtccgggggttgaaggctgcagtgagccatggtcatgctgttgcacttcagcctcagcgacagagtgagaccctgtctcaactaacccacttcccctttgtcccgagaatactcttgtctctaattctaatgtaacatcatatacatttctgttacattagggttttcccatttgtcccgagaatactcgtctctaattctaatgtaacatcatatacatttctgttacattagggttagagacaagttctgtttagaaataactcaataacttttatgttttcacattgaaaatcagtcagatttgcttcagcctcaacgtgtgtgtttatgtaaaattaaatgagcgctggtaatttttttttttcctaaacaggaagtgggttaaaaaacaaacaaaaaaagagaatgcatagtgggaaccactttttcatttcactctttaaaaatgtaacaggccagttgcagtggctcgtgcttgtaatcccaacactttgagaagcagaggcaggaggatctcttgagcccaggagttcaagaccagcctaggcaacatagtgagaccccatctctacaaaaaattaagttagctgggcacagtggagcatgcctgtggtcacagcttctcgtgaggctaagattgtaggattgcttgagccctggagattaaggctgtagtgagccgtgatcatgccactgtactctagccttttgagacaggacagagtgagatcctgtctcaaaaaaacaaacaaacaaaaattgaacagaaacttgattatactcacattggaatttaaacagaaaatcaacatggcccctctacgaggaaccaccttaggaatcaatactggtgtttctgctcctagggtagtgctctgcccgtaatagtcactcagatctttgtaaatgcatgatatttttggattcctttggaaagtcttcatattcttcattacatttwwaaaaaaatttttgtagttttttttagtggaaagggggtttagccatgttggccaggctggtcttgaacttcttgcctcaagtgatatatcctcctcggcytcccaaagtgctgggattacaggcatgagccactgcaccggccttattacatttttgaaaacatttctactgatggcaaattggaatctttttcactgaatttgccggcagagggggtttctagatgactactggaattcatgtccctgccgtccctccctttcccctgattggagcagctgctaggacggtgggcaggtgagcctakgaaggaatgagtaagacttgattctgtaagagaaggaacttgagaagcttgtgaaagactgttctctctgagctagaggacagaatggagccaggtgagagaacttgagaaagaacagatactcagaagggctttgaccacggagatctgaggattcaacagggtgactcaacaggcaagataagtatttcctatccttgaggagtggaagtgaggagacctcagagacttcttcaagtcccaaaatagattcagtgactggtatatctgatatgataacttactactgctggcaaagctggcatcatttaaactatcccgggcgacagagtgagactgtctcaaaaaacaaacaaacaaacgaactatataagggtgaacagtgctataaggaaacaaagaaaaattgcagtacagctaagaggacccaatatccagacatggaaaaaataaacagaacaccaacacccagaatagcagttttcagtgaaatcaaactgttaaagaaaaaatatctcaatttaaaaacaaaaatcctgacataagagattgaaatataatatgaaaaatgctctctggaactaaaaatagattgtgtttttaaaatatacatatatatgtatgtaatagttgaagggttggatgttgagtaacacctgggtaagcagcttggatattctagtgcaagaagtatctcagaagagcagaaacaccctgaagtaaatggagagagacttagaagacacatccggggaacttcacatgcaaataccaggagtcccagaaggaggtctggaaagagaacaaatagaggagaaacaataattgaatgaataataggaaacagttcccttgagctgaagaaagaccgatatggatgtagactaaaaggtttaccaaatttgaggctgaatttatgagggggagaaagacatctgggagaacctcagaatttcaaggataaaaaaatcttccaagccttcaggcagaatatatgttacttacaaaggaaaatgattgcagactcttttatcttcaatgccagaaactagaaggcagtggaataacatctgtacgttgctgatacaaagggactcagccaagatagttacttattgacaagatgaagggaagatatgtggatatgctaccacacttgagaagagtcttgtagaaagggctgttaaccaagcagcaaatctgtcagaacagagagttttcaagataggagtcagaaaaaagaggagagaaaataatggctggcaaataaacctgtagtacatttaatatatggtcaaatgtacatggattatatagaataactgggaatatgaaatacaagtaccaaataacaactccctatattgaagagacaagataagagaaaagtttaataattgtctctagccaaaagcactacactgtcttcaaaacctggaatttggggaagagggaaatgtggaagtcattgaattcttttcttttcttttttttgagacggagtttcgttcttgtcgcccaggctggagagcagtggcacaatctcggctcactgcaacctctgcctcctgagtagctgggtttacaggcgtttgccaccatgcccagcaaatttttgtatttttagtagagagggggtttcaccatgttggccaggcaggtcccaaactcctgacctcagggatccacctgcytcggcctcccaaagtgctgggattacaggtgtgagccactgccccaggccagaagtccctgaattctaaaggacttatatgagcatgggaacattagggaagggaacactttctaaccgtctcgttttgaggcagctacaattctagatggtatctttgttgttgtttgttttttgagacagagtctcactctgtcgcccaggctggagtgcagtggcacaattagctcactgcaacctctgcctctgaggctcaagcgattcttgtgcctcagcctcccgaatggctgggattacaggcactcgcccccacgcccagctaatttttatatttttagtagagacagggtttcactatgttggccaggctggtctcgaactcctgacctcagatgatcctcctgccttggcctcccaaagtgctgggattacaagcgtgagccaccacacctggcctagatggtatcttttaaaaaaattagactgggcgcagtggctcacgcctgtaatcccagcactttaggaggctgaggtgggcggatcacgaggtcaggagattgagaccgtcctggctaacatggtgaaaccctgtctctactaaaaatacagaaaaattagccgggcatagtggcgggcgcctgtaatcccagctacttgggaggctgaggcaggagaatggcatgaacctgggaggcagagcttgcagtgagccgagatcgtgccactgcactccagccggggcgacagagcgagattccatctcaaaaaaaaaaaaaaaattatattttctgtttggtgctagggtgtatagaaatgtttttgcatttaaacattataggcagctacctttctaaactttcttgttgagtctaataatttatctagagtctcctggattttctgtgcaggtaataatataatctataataatattccaattcttacatccttggtttcctttttcttgctttactgcactctcctctctcttcctctctagccttcaccagtagttttctcttgacttattgagagcccagcaatgcttttaagaaatgtttattgcttatttatagttttattgtaataagacagccctttagagtatataagtcaccatatagttgatccatgaacaatgtggtgttagggatgctggctcctagcagtgaaaaaaagaaaacatatttccaaaagcagaagactagtcccatccatttttaattaaatatattactagatattttatatttatattttttcaatatattttctaatttgttaaagtatatattaacataaaaactatatacctttattacaaatatactagtaaactgaactctcttattagtactgaagttttctgcagattctcctagtttttttaggtttaaagtcttatcacaaaaagtgacaactgtgtttctgcctttttgttatatgttaaattatttttccatttcttattagattagctaatccttttagaacaatgttgaatagtaacaatgatgggacctatatttgttgtgttcttgtcaataatgggaatgcttttcatcataatatatatgcagtttcttccctttttttaactttaattcttgcatcctttctactacttaatgctgtgttagtattaaatgtgatagttaaagcattaaggtcttacttgatttgctggaaatttttgtgtaatgttcctatctactaagtggacttggtaagttggtaacttattctgaactaccataaaatctccatgtaagtttttaaatgcttattaaaattgaaatattactttttagtcatatctcaaacttggaactattggagaattaagcaataccatattgtttctgcccttagtggtttacaaattttgttagggcaaataaaccatacaaatataatgcaaccagagaagtaatctacctagatactcctcaaatgtgtgaactcttgattgtaaagttcaaatagatttccataatctgttaattatggaaattaattccatctgtatcttttcttctgtgagagccttggtgtcacattttgtttaattttcttattagcatacttattctgtattccagattctcaattaaccatataatatagttcatgtaaagaaatgatagaactgatttttatttatttattttgagataagatcttgccctgttacccaggctggagtgcagtggcatgatcacagctcactgcagccttgacctcctgggctcaagccatcttcctgcctcaacctcctaaatagctagaaccacaggtgcataccaccatgcccagctagtttttcagtttttktgtgtgtgtgtgtgtggagatggggtcttgccatgttattcaggctggtctcgaactcctgggctcaggaaatccttgcacctcggcctcccaaattgttggcattacaggcgtgagctactgtgccctgctagaagtaattttgataaaatatccaaacatcacattagtatttaaaattattcagtttctctttgcttctttgggtttgtggcaccctggtcacccccatctggctgtgatagcctctgtagtccgtgggctggcagtttgctcttcttttaaggtttctttcctacacaatccccactttctggtaagccttcttttttttttttttttttgagatggagtcttgctctgtcgcccaggctggagtgcagtggcatgatctcagctcactgtaacctctgtctcccrggttcaagcgattctcatgcctcagtctcccaagtagctgggacttcaggcgcctttcactatgcctggctaatttttgtatttttagtagagacagggtttcgccattttggccaggctagtctcaaactcctgacctcaggtgatccacccgccttggtctcccaaagtgctgggattataggcatgagccactgctccttgccctggcaaggtttctatgcagtctgttaggtgtacatcctgcagcttattggtttaaaatgtactagcctgtgatgtggtctctttggggccaactgggagaaagaaaaatcgatagtgcagcagttttgatactgaatattgacaagtgtctttatgaaataaagaaccagtccctcgaaaaaataaaaataattaagtttctgtattgcacatattcttcttagctgtgtgagctgcagtagctgtctgtacctagcttccccttatataaaattaggtattataaataacctctaaagccctttgttgcatatttttcaaacttttaattatgaaaaaagtcaaacatatgtacaaacatgtatacaagtagggagagtagtacatcacgtactattccgcttcagcgatttcaccacatggccaatctagttttaccagccctcacatctccatctccctttaactccacttctaacctcaccagattattattatattattaattaattaattaattgattaattattttttcgaggcagagtctcactctgtcacccaggctggagtgcagtggcacgatctcagcccactgcagcctccacctcccaggtttaagtgattctcctgccccagcctcccgagtagctgggattataggcgcccaccgctgtgcccggctaatttttgtatctttagtagagagggtgttttgccatgttggccaggctggtctcggactcctgacctcaagtgatccacccgcctcggcctcccaaagtgctgggattacaggcctgagccaatgcgcctggccctcgccacattatttttaagcagatctcaatcatagcatcatttcatctgtacatacttcaatatgtatttttaaatgattcggtctctttaaaaagacaaaattattatcatagctaacaaacataccttaatatcatctaatatctagtcagtgttcaaattccctcaagtgtctcataaatgttttctttgcagttggtttatttacatcaggatctaaattgttccatacattgcatttgtttgataagtctcaagtgtttttaatctaaagcagttacactcattttttttcttgccacttatttcttgaaaaaccaggtcgtttatcttataggagttctgtcattccagattttcctgattctcccagtcgtatcatttaacatctttctatatcctgtaaggacccttatattagtatattgtttattcccattcttctttcttctggcattattttatttattcattcatcatccaacaactattgattggacagttatcacgcagcagacatgggtattggggatacttctttggcctttttacctagtgtatgtctaggttggtagaagttaggttttaaaagcatatttaatccagcatttatgcaaagtattattaaagccctggtggtactcttgaactgaactgccgcatatagctgtgtggaacatatccagagttgcttcctatctgctatgtactggataaagggagttccccggctccaagcagtactgaagattctgtggcctgtggtgtagacgatgggaaacaaaggactatgggtgagaatttactgagtactggggcatgctgctgaggtaactcttaggaatatttgacagttgcagccagctttccaatcaccatctttctttttcttctaagtagtccaggaatcagtttggttaaattcctttcttctgcaatttgaccaagactcctttcttccctggtccycactgtgggaccaaaaccatgttttattgcttctttgtttcytttatgtttctgtagcagacaattcttttaagattttctgaagagtgttgttttttgcagtggggaaaaagatgagagtgaaaaaggcacttcttcaatatttctcaaactatatgtcaagactcgttggtgaggcatgaaatcaatttagtggattgtgaaattgatttagtgagtagcagccagagttgttttgttgttgttttgttttatttctagtggaatcgaatagaaaatattagagtggattgcatggaggaagggtcagtattgtttcataagcttttgtttcatatatgaaaatgttacttattatgggtcacagccaaaaaacttaaaagcttacactttatggtgcctctctttttcaacttctttgccttttctcaccctttctcaattacccttcctcacatcactgttgtcattaaagttgatacagagagttaggaagttaaaaagggaggtctctgaggtaacaaagttctaacatattattttccctctttgtacctcccttatgttacttgtcactttcttttttgatttttgagacagtcttgctctgttgcccaggctggagtgcagtggtgcgatcttggctcactgcaacctctgcctcccaggttcaagcgattctcaggccacagcctcccaagtagctgggatttcaggcgcaggccaccatgcccagctaatttttgtatttttagtagagatggggtttcaccatgttggccaggctaatcttgaactcctgaccttaggagatctgcctgccttagcctccaaaggtgcggggattacaggcatgagccactgtgcccagctgacttctcactttacattcattcattttccaaacattcattcttacatgccaggcacagttctctgcactattcagttgttatgcatttgacagataatttattaactatctactcggtgcaaggcaacatgggtactaagatgaatgtgacacaatccttaccctcaaggagtttaccatttagtgtgggagatttaagagtttgttaccaccatttgtactttgtcctcccctctgccctttcctctacttccctaacctgtaggtctttgggatcctggggtaacaaagtcagaaaaagccttctttgactcttaagaattttaaattttattcatacaataaacattcatcggacacttattttatgccaagctgtgctctgtttgctgaagatacatcagagaacaaaagagatatcaatcgctgtccttatggaacttatagtctaattgggagagatacaatagacaacatgatgaatggcaaagtatatagtatgctaaaggtaatatgctatgaaaaacagaacaaaggaagggggattggagtctcagccattgaggaaggaaggtggcaatttaaaatagagtagaaaggtttggcattaggccaggagtgttggctcctgcttgtaatcccaacactttgggaggtcaaagcaggccgatcgctggagcccaggagttcgagaccagcctgagcaacatggcagaactccatatctacaaaaagtagcagggtgtggtggtgtgcgcctgtcgtcccaactactcagggggctgaggcaggaggatcacctgagccttaggagttcaaggctgcagtgagccgtgatcataccacygcactccagcctgggcaacagagttaaaccctatctcaaaaaaaaaaaaagaaagaaaagagatgtttggcctttctgagagtgccaagtcctaaccgtcagaccaccagggaaggtaggtttggcctttctgagaaggtgacgtttgagcatagactttgacatttgagcataccgttagtcttgggggtaatacagttagccaaaggttatctgagggaaaacatgcaaggcagaggaagcagcagtggataggtcctgtggactagtatggctggcatgatgcaagagcagggagaagaccagtgtcgccagagtgagggaagaggagtagaaaatgagacgatgtccataaggaaatgggggtcagatgttataggcccttgccaagacttggtcttagattactctgggtgaaatgaggagctgtttcaggttttcaagcagagaagggacctgatcaaacctaaatgtttaaaaaacctctctggctgttctgatgagcctagattcttgaggggcaaaggggggaacagttaggaggctattgcaggaactgaggcacagattttggtggctgtgaccaggatgacagcagtaaaggtggtggacagtggccagattctgatatattttcaaggtagaaccaacagtatctgctgatggattgcctttgggatgtgagagaaagagtcaacagtgactccaagatttctggaaaatagcctggtgcggtggctcgcatctgtaatcccagcactttggggaggcccaggtgggtgaatcacctgaggtcaagagttcgagaccagcctggccaacatggtgaaaccccatctctactaaaaacaaaaaattagcctggcatggtgacgcgtgcctgtagtcccatccactcaggaggctgaggcagaagaattgcttgaacccgggaggtggaggttacagtgagccgagatcacgccagtgcactccagcctgggtgacagagtgagattccaactcaaaaaaaaaaaaaaaaaaatttaaaaaaaataaagatttctggcttgagttactagaacagtggagtcgccaggaactgagatggagaaagctgcagatagagcagatggagggcaagcttaggaattgtgtggggtgttgtgtttgaacatccaagtggggacagtcattaggcagcaggcctggtgaatgagggtcaggagagcggtccaggttggagataaaaaaatctgtgggttatcagcatatagaacatataaaaagccacaaaactacatgataccatctaggcagtgagtagaagagaaaggactattgtccatttcaacattgaaaggttgggaagaagaggaagacccacataggagagtaaggtaggaagatgaaaggaagatgaaagaggagatgaaagccgactgaagaaggagcgtggggagtgatacagtttggatgttgtctccacccaaatctcatgtcaaaatgtcacccccagtgttggaggtggggtctggtgggaggtgattggatcatgggggcagctttctcctgaacggtttagcaccatcctccttggtactgccctcaccatagtgagtgagttctcatctcgtttttaaaagtgtgtagcacaccacctggctctcttgttcctgcttttgccatgtgacgtgcctgctccctcttcaccttccaccgtgagtacaagctccccaaggcctccccagaagccaagtgacgttggagccatgcttgtacagcatgcagaactgtgagccagttaaacctcttttataaattacccagtctcaggtatttctttctttttttttttttttttgagacggagtcttgctctgttgcccaggctggactggagtgcagtggcrcgatctcagctcactgcaacctccgcctcccaggttcaagcgattctcctgcctcagcctcttgagtagctgggattacaggcgtgcgccaccacacctggctaatttttttgtattattagtagtgacggggtttcaccatgttgaccagtctggtcttgaactcctgacctcaggtgatccacccacctaggcctcccaaagtgctgggattacaggtgtgagccactgtgccgagcctaggtatttctttatagtaatgcgagaacagactaatacagggagtgatcaattgtgtcagattatgctgatagttcttacaaaatgggactgatcgtcaggtttagtagtctgtacatccccttcacatcacttacagcgtttgtaattattaatttataattatggttgttcagtgtcttctttgctagaatgaaaacttcttgaggatagggacagtgtttgctttgtttgttttattatagtcattgtagacattcaataaatatttgatgagtgagtaaatgagtgaatgaatgtgcaatatgattaccttctgcctagctccaaaatatattctggacaaagcttatataataggcagaatgttctgtatcagggaatatagagggcattatctggtccagcaggaaaaatcagctcattgctgagatctttgctttagcttcaagatattcattttagaaggtttactagacatcttggagccagtgatgttatttggtcctagacttgatgacacactaaatccaatttacagtcatgttccttgtggtgcatggtatgatgaattatgtactggatgttgtgttttgtttttgttttttgagacagaatctctgtcacccaggctggaatgcagtggcgccatctcggctcactgaaacctgtgcctcctgagttcaagtgattatcctgcctcagcctcctgagtagctgggactacaggcatgcaccaccacacctggctaatttttgtatttttttttttagtagagacaggggtttcaccacattggcgagggtgctctagaactcctgacctcaagtgatccacccacctcagcctcccaaagtgctgggattacaggtgtgatccaccgtgcctggcctacagggtgcttttgagacatagtagctcaggataaaggatcagagcagtagattttcaaaagtaggtaaacaattgaaatgagatctcaaggggatgttggaatttttcaaaaaggagaactgggaaagacatttcttggcagagggagcgacgcatgcaaagattgcagtttgggaaaatactttctgtgcggtggaactacaaggttggtgtatgtatgatagggtgtgggcttgttatttcccactgaacttgagcaactcaagttgtacaggttgactggaatgttgggtgagtttgagagtgtggggaagatggatgagatggatggtcttgtctgccaagtttaggagcttgaattttaacctatattcagtggagagccactgaagaatcttagaagcagaggattaataataaactggggaaaataggagcagtgaagtaatatggttgctgatgaggtttaggaagtttaatctggcatctgaatatgggatggcttgtaagactgtagagagaagaggcaggaaagctagctagaatattacattattcatgagtgaggcaatgaaaatggaggagtgaaaatggatttgagagggtgttcaggctcttggctgtttgagaggcctctatttaaaagaaaacactcatctcctcatcttagacgacagcgtagagtgactctctttatgtcagctggaaccagaagtaatctcccaacattattgcctttcaagaaaaaggagatttaytgtgcttaacggagtgggtacagtgtaacatacattatcctcaatcagagcagtgtcccggtctcccacttggcttctcagctgcatgttcttctcaacactgacttcattgctcctcctggttttagcacttccaccctgctgaattcagcacatccagagaaaggatcagagggccggcctctagttgtttcacaacatggaatttcaggcttccaactaggtcacctccagaattgtaatttttttctttttataagacctgtttcatggttcttgctgaaatggagggtggggaaggagagagggatgatggctgctattcacaatgcctactcttacctcatgactggtctgggcaagtatggtagaagcaggaaagtccacttttgggtggatttgatttgggcttggggtggggagtctgggaatggcagctactgrtttggtaatggctacagagaggaaggcagtagaagtaccacagagcagctgcagacttctgtcacctggactatattacaaatagatttgggaactcagctaaccagggagggtgaggcgacaaggtggcagctcacctccttcctgtctggtgctagaaatcaaaacctgttcactaactaggttaaacagtttataccattttcattgattctgacatgcccatgctttatatttgtacatctctgatctcagtctgtatcttacaatggatgatatatcatagtttaattggcagcttttttctttctttagtggtccctaaggtaatggtgcgctgtataatcagtggtatcattggttcagtggatacacacatgagtgtgtggatatgtttggtggtggctgacaggtgtcaaagaggggaaacaagctctcttcccagagaaggagtcatcacaggcaatgctgatattttaagcctcatacacacttcatatgtttatgtgaaaggaaatctttggtcttaagactgttggtactgtctgttttcaggcagtaatctcttagctgttatcaggagaatcaattggaagctattagatgtctcttcagttatttcttaataagacttaagttttcaggtcgatgttgttgactcttgtgatccatggcttatctgctttcattataaattttgcttattttctttcccagaaatcatcagtgaatttcatttgattgatcctactgttaacctgcttttattgttaccagttttttctaacctattgggttagcttgttggcattgcaaaatctgtgttgagaaatactcaatggcccactccttgagttttgagtgcctagttgtaccttctttgtatctttcctagaaagattgttaaagtaatgataggttggaggaacatttcttattctatagacactcacacacacacacacagcatgtatatacttatacatgacatattttattagacttctaatttagagtttttaaggattcttgtacaattcatgtagtttacatggagactagcagtgtgcatgtatgcatatagtctcaaaatagattatactcaattatgtacagaaaagttctgcagttttcgggagtgagatgataactgaactccaagaactttggttaacaaggttaaccatttagttgcattaaggatgagagcctggctctgaagtcaggctgctgggtgtttgaattttagcttctgtgaccttgggcaagttacttaacttctctgtgcttcactgctcctatttataaaatgggaataacaacaggacctacctcagggttctaagaattaggtaagataatgtatgtaaaataggtaacagcatgcctggcacagggtacacttaatgaatggtaggtgctattttttattttattttattcatttttaatttttctgtttttttgacaaacaawtagggtctcactctgtcacccaggctagaatgcaatggcacagtcatagctcactgcagcctcaaattcctaggctcaagcaatcttcctgcctcagcctccagaatatctgggattataggctctagccacaacattcagctgctattttttttttattattaataaaggatcagttcaagagtgagaccagagctcttgctcttgatctgttggttaaggaaaaaattatttctagggctggacacggtggctcacacctgtaatcccagcactttggaaggccaaggcaggaggacggcttgagcccacgagttggagaccagcctgggaaacatagcaggaccccatttctaccaaaaaaaaaagctggatatggtgggagggtgaggtaggaggatcgtttgagagcccaggagatcaaggctgcagagagccatgatctcaccactgcctttggcctgggtgacagtgtgagaccctatctcaaaaaaaaaaaaaaaaaaaaaaattattcctagtaaatgatttttagttatgaagtagaaaagtgtcttctaactcagtgctttcaagaaattccctaaattaattgaacattaaacaaaatagggatgtaagttccatgaaggtagatgccttatgtctgttttgtcaacatctgtgtccttaatatctagaatagcgcctgacttacatatagtaagtgcttaataactatttgttaaatgaatgaaaaagggccaatggctcttaaaagctacagacatttcatcttatagatgaaaatatgtaagttattctagtatgtaataatttaaaattgtattttaacaatatatggaaataagctttaactaaaatactagaaactcacaaacctaagtacatttaaataagttgactttctgtgaacctatgaattatgttggaaagtaaataaataaataaatagacttttcttgtttgatgtaaactaggatatatgtaagaaaattgagatgttactgttgacaatgtgtaattaataatgtactgttaattgtagagtttaaagttacttcacataagagacataattttaaaagtacacctaacatggtaaaaattttatgcaaacattaacagcagttatccctggatagggaaattataattaattaagcaattttttccttttacttctctttcttttctttttttcttttttttttttttttttttgagacggagtctcgctctgtcacccaggctggagwacagtggagtaatctcagctcattgcaacctctgcctcccaggttcaagcaattctcctacctctgcctcccaagtagctgggactacaggcgctcgccaccatgcttggctaatttttgtatttttagtagagatggggtttcaccatgttgaccaggcttgtcccaaactcctgacctcaagtgatccacccacctcrgcctcccacagtgcygggattacaggcgtgagccaccgcacctagctattttctaatattttctacaaaacagtgttgtgtgaatttaaaaaggacccccagaaatccaaccaatatttattgagtgtttttcaaggaacctattcactgactaggtgaaagagtttatactactttcattgattctgagatgcccatgctttatatttgtacatctcagataccagtctgtttcttacaatrgatgatatatcataatttaattggcagcttttttgtttccttagtggtccctaaagtaatggtgcactgtataatcagtggtattgttgrttcagtgaatacccacaagaatgtgtgcaygtgtttggtggtggctgacaggtgttaaagaggcgaaacaagctctcttcccagagaaggagtcatcacaggcaatgctgatgttttaagcctcatacgcactccatatgtttatgtgaaaggaaatctttggcattaagactgttggtactgtctgttttcaggcagtaatctcttagctgttatcaggagaatcaattggaagctattagaggtctcttcagttattccttaaacaggcatgcaaattcttgagcattctaaatcagaaagttcattgaattttactttgagtcttatggtttggtctgtagtataaggcagtgttgcagggtaaggaacatgtgttttccacccagttctctccgtagaacatttggtaaatcctggggccaggcgtggtggctcatgcctgtaatcccagcactttgggaggctgaggcggacggatcacaaggtcaggagttcgagaccagccaacatggtgaaaccccgtttctattaaaaatacaaaaaaattgccagcagtggtggcgcacgcctgtaatcccagctactcagaaggctgggttcaatcacttgaacccaggaggcagaggttgcggtgagcggagatcacgccattgcaccccagcctgggtgacagtgcaagactgtctcaaaaacaaaaataaaaacaaaaaaacaaaaaaaatttggcaaatcccttaagcaatctggactttgttttcatcagctaagaaatgaaaggattagccttgataattgtgaagggtggtgcttgcttgttacttccatagttttattatttgatttggagttatgagtgtatgtgtgtgtgtgttttctctacagccatacacactgctgctatggatatgctgggaggacctggtatcgaaagccagtgtagaaaagttgatatcattgcagatgcagcatattccattttccaaaagccaaaaagttttactggcaactttgtcattgatgaaaatatcttaaaagaagaaggaatagaaaattttgacgtttatgcaattaaaccaggtaatgcttttatagtttttaaaagtagtgatacgtttttccatattttctgcaatgaacatatctgttttttgtgtgtgtttgtgtgattgtaaaatgaatgtgttcttttaaaagctgtcttcccaatgaaggaagaaaacccataccaacacaacttaaaaaaaaagatgaatgaaaaatagaggtgagttgagggcttttgaagtgwtatatatatatatatatataagcacagaaagtcagatcagttactagccacttctaaatctcgaaataagaaatgaaaattattttttaaagttggtcttaaaatcacagagtaaagattttgttcaagaatatgtggtaacagatggtacagtagtgggttatgtatttatttatttatttgagaaagggtctcactctgtcacccaggttggagtgtagtggcgcaatctcagctcactgcaacctctacctcccaggctcaagcaatccttccacctcagcctctagagtagctgggactataggcatgtgccaccacacctggttaatttttgtatttgtagatgtggggtttcaccatgttgcccaggctggtcttgaactcctgagctcaagtgatctgcctgccttggcctcctaaagtgttaggattacaggcgtgagccactgcacctggcacagtaatgaatttttttgtttaaaataatttatgattgtggactctctaaatatttgtctcttaagcgcagtctcttagagtagcttaatgacagatggtgtagatgagtgggcaggctctgtctcatggacagtaaagtgatctgagaagcttctagaaagccctcttgttaagtaactctccctctctgaaattggggatgataatgataataatggatttttaccatatagaatatgatgtattctaatatagccatacataggagttatatttatttgcgctaaagtatattttaaatattattcattaaactgagcttctaaatgacacaaaccacgtttatatttgtatcatccctgctcatctctgcagttcaaactaaagtaaatagcggattatagttttacaaagcactcttatrtgcattatctatttagcctgcataacaattctgtacggaaagtaatgcttagtgattaagaacacraaatttgggagaagacaacccagcttcatattgcagctctgctgctcactgctatgcagctttgagcatgtcacccagtttgtctgtctcagcctcaatttccatattggtaaacttaagagaatgatacatttcatacaagatttttgtaaaggctaaatgtgataatgtataatgtgtttggcacagtgcccagcatatagtacactcagaatatttagtagttaatatttacaagtggaaaaacaggctcagagagattgagcctttgcctaagagcagatggctaataggtggcagaacctgaccagattcaggtcttccgggtcctggtacccaggaatataattattaccttaggttttaaagacacagtgtaattgtgcgcaagttttaaaattttatttaaattaaaaatcctattaagtattgagaacttaaaatgaccagatactatgatattaggatataacaaagatgaattcattcctgccctccagaagtttgcttaaacttctgaaaaagagagagagagaggcagragaccgaggcaggaggctcatttgagcccagaagtttgagaccagcctgggcaaaacagcaagaccccatstcaaaaaaaaaaagagagaaaagaaaaagagaacaattgagattgttaacatctcactgtactacagttttgaaggctttgtggcctttaaatcttctagtgtgcacatgtcttggagttatcagtgtaattaaaacagttaacctatttgctaaccacaaccattagctgaaaataagacccagtggaggctgtgtgcagtggctcacacctgtaatcccagcactttgggaggccaaggccagtggatcgcttgagccaaggagttcaagaccatactgggcaacatggcaaaaccccatctctacaaaaaataaaaatgagtgttcaggcrcggtggctcacgcccataatcccagcacattgggaggctgaggtgggtggatatcctaggtcaggagtttgagaccagcctgaccaatatggtgaaactctatctctactaaaaatatgaaaattagccaggcatagtgatgggcacctgtaatcccagctacttgggaggctgaagcaggaggattgcttgaacctgggaggcagagggtgccatgagctgagatcgtgccactgcactcaagcctgggtgacagagcgagactccgtctcaaaaaataaataaataaataaataataaataaataaataaaaattagctggatatggtggcttgcacctgtggtccctgttacttgggaggctgagggaggaggatcacttgagcccaggaggtggaggttgcagtgagccaagatcatatcactgcactccagcctgggtgacagtgagaccctgtgtcaataataataataataacccagtggaataggatggaataggatagcttagtgttcatgatgatggagtgagaggaagagggaaagagagaagagacccaagtgcactaatgctgagaagaaagtccttcttaagaaggggccctctgcttttaggacggcaggtaagaaataagtcctgacaacttcggaagaatgtgggccagaagagcagtgtaggatgagaagggcagaggttcctgggagagcaggtaaaggctttacagaacaggtgatcttttggggattaaatcttgaagataaaatttatcagaggagagaaagataactgaattatgagaaaattaatttaatgaagatcaggtcattcgacagttctcacagaggccttttcttttgcaccagaaagatttttaataaaatagatatgtttattaaacagatgttaaaatcttactatgttgtagttacattaacctaatggtttggggtcaatttttcaggtcatcctttgcaaccagatttcttcttagatgaatacccagaagcagttagcaagaaagtggaatcaactggtaagatctagactatattttatgttagaaaatataaatcctaacttatgtatttcttccaaaatatggaattgatcctataacagtgacatttctgccttctgtttttaaactgttttgtactttaaactaaacaagtaatgtgagatctcagttaattctagtaaagaaggttgttttgttcatctaccagtaagaagttttaataaggctgggcacagtggctcatacctgtaatcccagcactttgggaggctgaggcgaatggatcacttgagtccaggagtttgcgacgagcttgggcaacatggcgaaaccccgtctctacaaaaaaaatacaaaaaaaaaatacgttgggcgtggtggcacgagactgtagtcccagctactcaggaggctgaggtgggaggatcacctgatcccgggaagttgaagtttcagtgagccgtgatcgtgccactgcactctagcctgggtgacagagcaagaccctgtctcaaaaaaaaaaaaaaaaaaaaaaaaaagaagaagttattaatatattctttgcgtttggttaaaaacaagtctgaaaaaacttttttttaggttttatttattttcttttgcactgtctttaggtatttcatgttgatatgttattttgaggaaaagtgtgtcatatatcaaatacatctaacaccatttccacagtttgtgttatgtgactattttatgaaagaaatcaacttcaaaggaggtttgggttttacttygttttgtttctgtaattcataaacaatagtgcccttgaattggtccagagtttacattttagactttgtgttctgacattttgccagtggcttacttgaagaaacactttaatgaatacctgtgggaagaatttctctcatggtttactaataagaatggctgtgcttcttctgggcccttaccttatttttatcttatagatgctatgactctcatcgatttttttttttagaagkctgatagaaaatgtagggatgaatttccttgatacctttagcaaatctgtggcaccttactgcaatgcattttagagccaaaccttatttccagctttcttttatttattctttattatttatcttttctttttccagatttttatggtaatttaaaaaaattacttaggtaataaaaaggacttttttgtattacagacaatttaaaacaatagaaaggaaaatagttactcataatcctactacccagagtattaaaaccaggaaaaacaagactgtcagtctgtttctcaaaaggcctcttacagaatggtggaaaatacctagagagcttatcaaactctagaagagtctggtcttcaagttagttaagtcccaaactccgatttttgcccaacgccctaaggttggatctgtcttttagaagaaggcatgcatgaactgagatcatttaaactccaaattttaaataagaaccacttattgatcatgtatgttctttttgtttattcaacaaatatttactgggcacctcctatgtgccaaacactgtgctaagtactttacatgcattgtcctgtttaataccattaatccccaagacagatactcccctcattttacagctgcaattgcacagccagcaggtggcagaaccaagatttaaactcatatttctctgatttcaaagcccatgtctttaaccagtaaacttaaatggctttcctaacacttgaatacttagtcttttaaattttagcatattcttagtctgggcaacatggtgagaccctgtctctacaaaaaaataaaaaaaattagctggccatggtggcacatgcctgtagtctcagctactcaggagactgaagcaggaggatcccttgagctcaagagtttgaggctgcagtgagctatgattgagctacagcactccagcctgggcaacagagcaagaccctgtctcaaataaatacgtaaattagcacattctttcccctgataatccagtttattaatttataacaaagagttgccatctcataggttaaacatgtaggtgcttgatcagcacattctcttcctttggatataattgtgcatgaaacagaatcatagtcagaaggtcatttcatgaccatggaatcagaacaagggagttagataggtagagtgtaaaatcagtgtttactggcatcaggctttgatagggataactttgcctatagccatctccacataagcaatgctcttacccttaaggttagaagactcaaattcctttggctaacttccctcacctaatgctgcaggagcatttacttctgtagctctctttttttgattctgtgtggttcagtcaatagcaattttacctgaccttttctgtagatatattaatatactcatatagatagtagcctgggctataacttacctctttcagtttatttcttatgtcctctcatagttcagctctttgagaaccatgtgtatcccttgtttccaaagggggagaggttcacctttctattgcaccaacaacttataataacccctgttaccatttcattataccttttccagtattcgtcgtgtgtatgttagctcttatatatgtaattattgtagacaatggacctagttttaaattgatgggttttttttttcttcccatcttaaaagcaatatcaaccaggcatagtggctcacgcctgtagtcccagcactttgggaggctgaggtgggaggatcgcttgagcccaggagttcaagactagtctgggcaacatggcaaaactttgtctctacaaaaagtacaaaaattagctgggtgtgatggtgcatgcctgtagtcccagctacttgggaggctgaagtgggaggatcacttgagttcaggagtttgaggttgtaatgagctatgatcaagccattaaactccagcctgggtgagagagtgagacccctgtctcaaaaaacaaacaaacgaaaatgcaataccattatttcttcattgattccccccacccctactctccactggaacacagggagcccactcagtcttgttttttttttttttttttttgacttccagcttatttttgtttttattttttatttggtttagagactgggtctcaccccgttgcccaagctggagtgcagtggctcgatcatagcccactgcagccctcaaagtcctggactcaaacaatcctctcacctcagcctcaccaatagctgggactagaggtgcatgccaccacgtccagctaatttttaaattttttgtaaagagggggtcttgttatattgcccaggctggtctcaaactcctggcctcaaacaatcatcctgcctcggcctcccaaagtgctgggattacaggcatgagctatggcgctgggcctattttccttcagttacagttttaattgcttctgttgcagttgttctggattctcagaaacacttattcttaccttggctcccctttccctttccctgtagttagcaccatttctcactggttctggctttctcttctgtattctggagaccttgttaagtttgtcctctgtattaaaaaggacagtctgataagatgttctatagcttagtttctgttccatattgtctcaaatggttaatttgctatggtgctcacttcctttttcattttatcctattgtcttttcatcacagccrgttatatataactttctgtccctgtttcatatagtttttttttttaaggctttatttatttatttttttgagacagagtctctatcaccctggctggaatgcagtggcatsatcttggctcactgcaacctccacctcccaggttaaagcaattctccttcctcagcctccctagtagctgggattacatgggtgtgccaccatgcccggctaattttgtatttttagtagagatggggtttcgccacattagccagtctggtctcaaacttctgaccttgggtgatccacccaccttggcctcccaaagtgctgggattacaggcatgagccactgtgcctggccaaagctttatttttttttatagcataaagttttagattcacagcaaaactgagaaggtacagaaatatcatctatcccacacatgcattacttccttccttagcagcatcctctaccagagtggtacatttgttagaattgatgaatctgtattgacacatcataatgatatagttttcgtgtggaagaattcttgtaggtttcatggtaaattagttttagatatttgctcttcagaatagcctccattgcctgtggcacattatttttttcataggcatcaggttatttttttttttctgttaattcttcctcatattaggagatatctctagagctagtgtagtcaaaggcaggaatgtgtaggttgcttttggctctcttccctgtctatatggaggaattcctttttctgagctgtagtttcagatgtggcacctgttgggcaaatagctcaggccagtgtgcaaggctgacatgtgaccttcctttacttcctctgtttaaaactactctccaggcctggctcagtggctaatgcctgtaatcccagcactttgggaggctgtggtgggaggatcgcccgaggccaggagttcgagatgagcctgggcaatgtagcaatagcaagatcccatttctacaaaaaagttttaacaatagccaggcgtggtggtatgtacctgtggtctcaggtacttgggaggctgaggcgggaggatcacttgagcccaggagttcaagcttgcagcaagctgtgattgtgccattgcactccagcctgggtgacagagggagaccctatctcaaaaacaacatgaaacacaacaaaaacacaaaaactactctctcctggaatgccctgctgccacggttcttcccctccccatccttgtcagccatgccttggggcatgtacttcccaggatgctccactgcaggactcccctactgtctgcttatcttatttgggagctacaagctttggaactggatttgaaagatgaggatgaggaatcacattgagtgtgtcttgaaaagtagcatgtgtaaaacagagagacagctyctgatcttagttggtacaagcccagagtctgatccagcgcgagcctctcttctttgttcgggtgggcagaggtattctttgagatctttcatgagggaaagcacaggagacctgtctttctggggctgactccatgtaccttagagctgctgaacctctcttcctagattcagacaatagattgtgtatcagtctaggtgatattcagtatttccccttttgtgtgtgtgtgcatttttatatttattcagtgtgaagttaggagagcctgtgtcagggactaccagccatatgtcatcttcttttgtgtactggaattctataaatatttctttcccattctggcttacatatttgtagtctgatggctgcacctttaaaatctatcacaggttttttttgtctcctgaagtttttttttctcttgtgcaaactcatcatgtttacgtctcaataatccaggtgataaattatgcagtttatctcttggcaaatgtctttmagggataaactaaagtttttgctgcaatctccttggcacctcatatgtagatgatatatcttgactaatatacaaatcacctgaagtagttacccacaaggaagggaggggttccagcagttatttatgtgacagactcagttctctctggtgtaactgctaaaacgaaacacatgacctgcctttggaaacatgaaggaagcctgtgtcattgctgcccttgctttagcagcctctgcttggtcaacttctggtgagtttcacatctcagcactgtgttcagcttttatgttggctatataaaaaatcarattgctaaacatagaaggaaatgtggaggaaatatttattactcagtggataaaattgcaggctctggagtcagactgcctggatttaatcttgaattgcatttgtttttattaaattgaaatgctttctggaacaagscaagttaaaaataaaaaggggaaaattaacttttgtatgttctgtatctggtcaccatcatgagttttttgttgttgtttttaaagacatctaatagtttttgagagagcgtgagtactcattgaaagcatagactttggagtaagacagatctgggttcaaatccggtgcccgccacttatatttatcattttgggcatatcacttcagctctctgaaacagttttgtcacctcttactttccttgtgtaattattgtgaggaataagagtgatggtacatcatattgtacatttgatgcaggaagctccctgtaactattggttgctgtagttattattatcttaaattttctacatggtaaaacttcttgtctgcatataataatgtctttcaaggatgatttctggcatatattttaatacactgacttgaacttccaggaggttcattaaaactattttaaattatccttattttattcttaattttaatgagaaaatcttcagattttaccataagtaaggtgttaacatttgtataagatggacatttttttaatcagagaagttagattggtatctatttttagtgtaataaacttgttacattttaaatatggtaaatgggtactttttctattctttctttcacctctttctttctttccttctttctctcttttatttttttattgagacggagtcttgctctgttgcccaggctggagtgcagcggcatttccttcttggctcactgcaacgtccgccacctgggttcaagcgattctcctgcctcagcctcctgagtagctaggattacaggcttgccacccagctaatttttttttaatttttttatttttagtagagacagggtttcactgtgttagccaggatggtctcgatctcctgacttcatgatccacccgccttggcctcccaaaagtgctgggattacaggcatgagccaccacacccagcctctctctgtgttcttttctttgaaggtttgaaatacctactaagtcatttgggtcttttctgaagttatttctttcaaaacttttattttattcaattataggctttttaaaaaataaaaacccaaattatccatttgaagtttcaaaacctgtttaagagttgacatgtagtatttcacttacacaattttttaaagttttcaaactgttttatctctttcctctgtttttttttttttttttcttttaagacaaagtctcactctgtctcccaggctggagcgcagtggcacgatctcggctcactgcaacccctgtctcccaggttcaagcaattctcatgcctcagcctcctgagtagctaggattacaggtgcacgccaccatgcccagctaatttttgtatttttagtagagacggggtttcaccatgttggtcaggctggtctcaaactcctgacctcaggtgatccacccaccttggcttcccaaagtgctaggattaccagcatgagccaccacgcccagcctctttcctctgttttaaaaattatttttcttttttcttgattagttgctgattttgtggtatcttattttttctcaaaagcaccagactttaaattttatttcatttttaattctacagcttttctcttttctgattatctttttaataacaactcgagatataacttatatataccaaaaaattcatcattttacgccgggtgcagtggctcatgcctgtaattctagcactttgggaggctgaggcaggcggattgtctgagctccggtgttcaagaccagcctgggcaacatggcgaaattctgtctctactaaaaatacaaaaaattagtcgggtgtggtggtgcacatctgtaatcccagctgcccaggaggtggaggttgcagtgagccaaaatcatgtcactgcactccagacggggtgacagagtggaactctgtttcaaaaaaaaaaaaattcaccatttggaagtgtctagtgatttttagcatcttcccagaattgtgcaaccatctgattccttactttttttacttttggtttattgttttctcctttctgctttctttgaggttgcttttgttcctgttcttacttgttgggctaatactttattgttatttcttttaaaataatgaaataaagtttgtgcatttatccccttaacatagctttggctacatccaatcgattttgttatatactttactcaattttgatagcattttaaattagtctgtatagaaaagcttagtatgggcagggtataggggctcacacctgtaatcataacactatgggagacagaggtgggatgatcacttgaggacatgagttcaagaccggcctgggcaacatagcgagaccccccccccatctctaccaatagaaaaaaattaaaacattaaaaatttaaaaagacaagtttaatacagaagtataaaaaaagcatagaacaggccaggtgccgtggctcatgcctgtaatcccagcattttgggaggctgaggcgagcagatcacctgagctcgggagttcaagaccagcctggccagcatggtgaaaccctgtctctactaaaaatacaaaattagttgggtgcagtggtatgtgcctgtaatcccagctattcgggaggctgaggcayaagaatcgcttgaacctgggaggtggaggttgcaatgggctgagatcatgycactgcactccagcctaggtgacagagcaagactgcctcaaaaaaaaaaaaaaaaaaagtatagaacagcwcaaagaaaaattttaaagtcacctgtaatccaattataagtacatttatattttggcttatttcctttcaaccacttttttttggcacatataatttaaaatgtatacccagaaataaatattttaccagtaggttcatattgttttttattttcttaagaaagaagctttatatatattatgtttaattgcatagactcccatttaatttaacattacttaattattgtgaatgttttccatgtcttcaaaaacaactttttgaggccgggtgtggtatctcatgtctgtaatcccaatcatgggtggctgaggcgggtggatcgcttgagtctaggagttcgagaccagcctggccaacatagtgaaaccccgtctctataaaaaatacaaaaaattagctgggcgtagtggcacatgcctgtggtcccagctactcaggaagcttgagctcaggaagttgaggctgcagtgaaccttgactgtaccactgcacttcagcctgggtgacagagtaagcccatctcaaaaaacagaccaaaaaaaatagataaatattggaattcatagctcaattttaaaattggcttctaaataataataccttatattaatagtaatgtgtctcattcacttacactggtgtacatttggaaaataactgggaagtggcattgctcaaataagcattgcaaaggttataaagtattaggttattgtcactgaagcatggggaatacctttttcaaattgaactggtgaagacraactgttggccacatttatgttttcaaattgtagaataaatatgtatgtgtgtatgtatttacatattcagccttatattgtttaattcagtgtctattcaaaaactgtcttatctaaaatagtcttacattctatcccagctcttgctctttttaaagtagaacccatcacttctcgacttaatttcatgtatgtatgcatgtatatgcatttgcatattgtctgtctatactagtcagttttcttttaagtctgcgtctggcttggtgtcatggtaatactgacctcacataattaattagaaagtgttccctcctcttgcattttttttttttggaagagatttgaaggatcggcaggcatataagaatagatactgtgtgattgattccatttatttgaagataaacatgagacaaaactaatatatggtgttagcaattaggaggggttgtggagtgggcttctgggatacctgtaatatcatctttcttgacctaggtggtgatgtttgatctggatacatctgatcactgtttctgaatgtatgttacatgtcaataaaaagcagtgtcatgctaagtgcaaggcagaagtggattgcccccagtgcaggcaataaaggggtacactgtagtaaattttaaaacaataataaaacaggctaaaaaaattctttaaggctttcatctctaatatctgttcgtactttaacttataaaaggaaaatgattttttttatttgtggaaacatcataatgaaaggcaatttatattcagtatactttatgaattaatagcttactttgtactatggagtatctttatgctgtcaattagatttcatgtaataacctttgaggaattgtattagacaagatggctgtgtataatttgagttgagaaacagattcaccttcagcctagagcacagattggccttggagttaatttaattaaygaattgttcttacctgtttctgggggcaactacttagctgcctctatgtgattctagaatgataaataaaggaacagagaggccgggcacggtggctcacgcctgcaatcccagcactttgggaggccaatgtgggtggatcacctgaggtaaggagtttgagaccagcctggccaacatggtgaaaccctgtctctactaaaaattcaaaaattagccgggcacggtggtgggcacctgtagtcccacctactcgggaggctgaagctggagaatcacttgaaccaggagacggaggttgcagtgagccgagatcaagccactgcactccagcctgggtgacaaagcgagactgtctcaaaaataaataaaggaacagagacagtattggggggcagcatcatgatatgggagcaaagcagtcctatgaactgctgtcttctcccctggctgatcatatgttaagttgttatagccagtgggttaagtgaatgcaagttttaaaatgttgcaggtaacctccattcccgtgacctagtgtttccagagagggcagcctgttagtcaggggactaacagtttaacctcccttttcatctagtgggagggataatctgaataagtgagacagggagaagaaactgaggttgtgtgtcagacccttctgagcattctctctttctgagcaggctgtcctcagttttttacatgatctctacttaagagcatttctaacccgtgatgggaggatgcagggtcaatccatgggtgaaaggactaggtgaatagattgaatttagaggtggagtgattagaaagtacacttgggtgttgattcaagctacagtcttcagtttagctccaccagttccacagctgatattttgatttccatctttctgattccaatgtctttttgttctcatttggttttagaactgagagaaattgacaaaggagtgattgattatcatccctcatactccagtagttgtgtttaggtctgtttcttttatttatttttttgagacagggtctccctctgtcaccaaggctagagtgcagtagcgtgatctcggctcactgcagcctctacctcccaggctcaagtgatcctctcacctcagcctcccaagtagccgggactacaggcaccaaccaccacgcccagctaatttttgtattttttgtagagacagggtttctccatgttgcccaggctggtctcgaactcctgggctcaagtgatccacccgccttggcctcccaaagtgctggaattacatgcacgagccgccacgcccagccttggcctcacaaagtactcagattatagaaggtttgtttatgataaatatttatagtttagtagtattttttaacctaatctgaaagtcagccttttatttggagagtataaagatttacatttatagtcataattgatgtgtgtttgactgttattctgtcaatttgatttatgcttttagatgccacttaatgcatttaaagtcattttggtcaaataggtctaattggtggcaagtctgtcctgctgattaattctgtgtggggtccttcactgccaagcattaaggtcatttgcttcaataatatcttataggtgctgttccagaattcaaagaagagaarctgcagctgcaaccaaaaccacrttctggagctgtggaagaaacatttagaattgttaaggactctctcagtgatgatgttgttaaagccactcaagcaatctatctgtttgaactctccggtaaggactgcatctggtaatctgaagtttttatgaaacaaaatgggrtgtttcctttggaagaaaatcagcgtccaacagtgatcccctggatagttggctgcattcaagacccttactcttgaatgtagacattcaagaacagcaaccataactattgatttgtttttgttgttgttgtgtctttgagatggagtctttgtcacccaggctggagagcaatggcatgatcatggctcacttcggccttgacctcctggactcaagtaatcctctgacctcagcctcccaatgatttttatttctagattaagatcagtgygtacrgacacatgtaaagtaaaattttattacaaatactcccagtgttatataactctggcatatttgagagaaaatcctgcttagaagggcatatgkatcatgacaggtagtatgatacagtaatttatcaaccataggcaccttgccatttttatctttgacattaaccaggtcggtctgacggtagtcagctttttttcactttttttatttttaaaaatttataattatttttttgcaatggagtctcgctttgttgcccaggctggagtgcagtggtgggatctgggctcactgcaacctctgcctcctgggttcaagtgattctcctgcctcagcctcccaagtagctgggattaaaggcacccaccaccacacatggctaatttttgtatttttagtagaggtggggttttgccatgttgcccaggctggtctcaaactcctagcctcaagcaatcctcctgcctcagcctcccaaagtgctgagattgcaggtgtgagccattgtgcccagatggtagttagcttttaaaaatctcttaatattgttcttctccatataaaatttacacgttaataatagtgtaagaactagctgccagggatggtggcgtgcagctgtaatcccagctactcaggaggctgaggctggaggatcacttgagcccaggagatcaagactgtagtacactgcgatcgcatctgtgaataaccactgcactccagcctgggcaacatagtgagacccatctcaaacaaataaaacttaagaaacagataaaattcgtgttaaaaaaaaaaaggctacctcagccccattatacacaaacttttttattcttcgtcctctctgctttatcttagtccatcttgccttcctgttcttacttccttgccatccttggaatccatcatccatggctttagtcactctcttgcttgtgtcctaaacttgctggaccctttgtgcttatgccatcacctgtcaaaagcctagtcctggctgaatcaaactctctggctgctccacagttgtatccaggctgcaaagttttgggggaggaaaggaaaaaaaaatcacaccacctgggtggatctgtaccagtagaaattgactattgccccgcttcagctgaggtttaagcaacacttcagaattctgtgtttttgtggtcagcttactgctgcattttccatagtgactatcttaaactttctcagtgttcctgaaatctcccatctctcccttcacctcttccctgccagtgtcagcagataattccacttgctctttgacagaggtaatagaaacctacagacaaaaatgccttcagcttcctgccatcagatatcaaatcaatcatgataggcatcatccttgcctccttccctcttagtagaatggarctcagctctccatcagtgcatctcaagctctaatgtctataccaagtacctgggatcttcctaaaatgcaaaataatgattcagcaggtctggagtggagtctgagattctgcatgtctgacaggtaatgacagtattgcagtccatggatcatacttggaagcaaagttctagatcccattttccctggccttctcaggaattttgtgcygttaattgaaccttgtcctcaatctgttcatcttgcagcctccttcccaatggtattttaatgttctcaattcttttctaactttaaaacagaacccagtgacaataacaaaccacacagcccatcttttttctccttttcagagccagacttattttcatctacaactcattcccctgaacacaccctgctgataccatttgtttccatttcacataattggttttcagcaaggtccttgatgacttccctgtcaccagtgggcctgtgtcattcctcccttgtgaccactctgcagcatttgatactgttgaccacactttccttctggaaatgctcctcccccagtccttcattgtaacctccttgctttccttccctgcctgtgatcacaccttgtcagtctcccttgctggctgcttctcctctatccttcccttaagcaatgttcttcaggtcactggctcagcactctcgacactctactcctgacactttctctaggaaaccccaaccattcacgcggcttcaatgaccatatgaaccgactgattatgtgtccctgtttctagcttagccagacttcatttgacatttttagttaactgtcacaaagatgcctcagcctaaaaacgtccaaaacaaccattcccaggaaatggtttttttgcaaccacccatgaaatctgctaagtgtctggcttgctgtgtctcttgggcagtgtcgatccacaccctctctctgcatgcctcgaaaaattgtggaaatccctgggtggctcgtgcctattatcccagcactttggaaggccgaggtgggcagatcaacagaggtcaagaccagcttggccaacatggcaaaacctcatctctactaaaaaatataaaaattagccgggcttggtggcgcgtgcctgtagtcccagctacttgggaggctgaggcaggagaattgcttgaaccccggaggcggaggttgcggtgagcccagatcgcatcactgcactccagcttgggcaacagagcgagactctgactcaaaaaaagaaagaaaaaaaaatggaggaaatcaagcgctttctgctcagatccaggcaagtggatgccgtatctgtcaagatcaagaaaaataaagttcacagcagcaggattatactttggttgtcacaaagagaaggcagagaaacaagctgaagcagtctctgccccttggtttgacagtgaaggagcggagatgaaccagacgtgctggtttgagctgtattaaaattttaaacgttgcctgtaatcccagcactctgggaggccaatcacttgagctcaggagttcgagaccaggctgggtaacatagtgagaccctgtctctacaaaaataaaaataaaaaattagctggatctggtgatgtgtgcctataatcccagctacttgggaggctgagatgggaagacagcttaagcccagaaggtcgaggctgcagtgagtgatgatcatgccacttcactctagcctaggcaacagagcgagaccctgtcttaaaaaattaaaaatcaagcaatctgctgttcttcagtagtcttctctcacttaaaaaacaaatccacccaagccaagaactagcagatcattcctatataccctccccaccttttcctcttcatatgcagttacctagtcttgtggttctgccttgacattctctctcaaatgtacccacttttctccatgcctctgccatggtcccagtccaggcatgcaccctcaagctcctgaactatcccaacaccatccttactagccatctgcatccttttgatttctctccatttattatctacactgcaggtagggccatacgtaaaccttaccatatcatcttccttccatgacacatcctgtaggatgaagtcatttaatcctttacatgactggctgtgctcagacctagactgcctcacaagctcatccaacacccatctaccttctagtgccactgtttttttttcagttcctcacacgtgctgcactcttgattctggcttttttgcatgtgctgttcccattgcctgaaatactttccctctaccctgtccatctagctaattcttacttaactttcaaatctcagcttcaactgagctttcctgaccctttttgaaaacttaattttgcatcgcagtaaaaaatacataacattttaaccacttcttgttctttttttttttttttcttttgagacggagttttgctcttgttgccccaagctggagtgcaatggcgcgatcttggctcactgcaacctctgcccccaaggttcaaacaattctcttgcctcagcctcccaagtagctgggattataggcactccccaccacacctggctaattttttgtatttttagtagaaacggggtttcaccatgttggccaggctggtcttgaactcctgacctcaggtcatctgcccacccttgcctcccaaagagtcaggattacaggtatgagccaccatgctcggcctattttaaccacttctaagtgtacagcttagtagcattaaatgcattcacattgttttataacaatcatcacctgccgggcacggtatctcatgcctgtaatcccagcactttgggaggccgaggtgggcagatcacgaggtcaggagatcgagaccatcctggctaacatggtgagaccccgtctctactaaaaatacaaaaaattagctgggtgtggtggcgggcacctgtagtcccagctactagggaggctgaggcaggagaatagcatgaacccgggaggcggagcttgcagtgagccgagatcgcgccactgcactccagcctgggcgacagagctagactccatctccaaaaaaaagaaaagaaaaagaaaacaaaaaaacaaaaacaaaaacaaaaacaaaacaatcatcaccatctatctccagaactttttcatcattccaagtgaaactctgtacccattaaacagttaactcccattccccatcccccagtccctggaaaccactgttctactttctgtctttatgagttttcttcctctggttatcttgattccttaatgtgctcccacatcaccctctacttcctcttttgtgagtagaaccatggttttctttttattgaagagtcttcagagcctagcagaatacctggacgtgcttaataaatatttgctgaatttgactgatggaggtctggggattttaacttggaaaacagcattttgtaagattattctaattgaagtaattattaaatttaagaagaacagggcttctatgacattgatttctatatgtttatctctctaggtgaagatggtggcacgtggtttcttgatctgaaaagcaagggtgggaatgtcggatatggagagccttctgatcaggcagatgtggtgatgagtatgactactgatgactttgtaaaaatgttttcaggtgagttttccagtttattagtttaccttattgttcagagaaaatttagttctgacattttgctttatcccttcccaaataatcaagacttgtaaatgttggcagcagtggaatcttagttttgggaaggctgttcttactgttgcctccattgccacttctccctcctctcacaagtggaaggtasatgtcagaattattttcttccattactgagaagccagtaatataatgttgggaacagtgagataattcaaagggactcctgggtgggcttcatyatattagctggcctaaggtattatgtttccaataacaccccagtcactagaggcactgaactcagtagcagcagttcgcttattgggagtagggttgtgcttccatcttgccagctgtttcaataggaaacacataccagcccttggccatggcctagtgaccctgctttctgtggagtcctaaacccagagaaccttttgtgtgattttctattctgtccatttacctctaactgtgccagaaaattaaggataattttctcttttctactcttagaaaactactccaaatgataagttaattaactcaaattctaaaaaattagaagcagcacttgaaactaagcataacatcctgatctaaagagtctttcatggagtgaattataaatgttattcagactttgttctgttttaatcttttctaagcaggaacatggtgtattctgtgccctctaagtctttctttacagttctaattcaggatgctaattgcctgcattccatctgagtcaatctgtatacggtgtactaatgatcagcatttcttcaacttttccctttttttatagtggtgttaaatgttcatataaaaattagaaaatataggccaggcatggtggctcacgcctggaatcccaatgctttgggaggccaaggtgggaggatcacttgcgtccaggagtttgagaccagcctgggcaacatggggaaaccctgtctctacagaaaatacaaaaattggttgggtgtgctggtgcgcacctgtagtccccagctactccagttaaggtaggaggattgcctgagcccagaggtgaaggctgcagtaagttgagataacaccaccgcactccagcctgggcggcagaatgaaaccctgtctcaaaaaaagagaaagtatacctaagaaaaaagaaaataaaattatttttaccataccactgaaagatgaccataatatacatatgtatgatgctaaaccataaccaaaccaaaatatggtttagcatctatatatgtatattatgctcatcttattatggtttgcataatttggtttagcatcatacatatgtatatttgtatgtgtgtgttagtgtatataaatatacatgtgtgcttataaaaacaggatcataccattactactgtttggcaatctttttcacttaatacattataacatctttcaatgtttatcattggttatccctttaatgatttttttttttttgagacggagttttgctcttgttgcccaggctggagtgcaatggtgttaaccttggttcactgcaacctctgccttccgggttcaagcaattctcctgcctcagcctccagagtcgctgggattacaggtgcccgccaccatgcctggctaattttttgtacttttagtaaagacagggtttcaccatattggccaggctggtctcgaattgctgacctcaggtgatccacccgccttggcctcccaaagtgctggtattacaaatgtgagccaccgcgcccggcccctttaatgatttttaatagtttagtgtttcttcagtgtttcaacaactatttctccatagagcttaaacacagtgctttggacacatttaataaacgctcaatgaatgtttggtgaatcggaatcttataaatatttgttttaacatgaagaccatttaaaataaaaatgtattgtcaacttctaaatggaaataacagtaattatgtatgatttatttattgcatgattgctacaggttaagcaatactcccaacagttctttccaataaaatatgttctccattttatagcagtaagtactgaggctttgaaaaattaaataataagcccaaggtcagctgatgaatgagaaaatagagcaaggatttgaatccaagctaactccaaagcttatgctcttcattattatgctagtctgccctccaaaggtgaagaaatcaagtgacttctttctttaatttacatttcacttatgtagcatacagttgaaataataggctttctattggtatctttctttgaatgtggtcttggattcactggatgaggccagtcagttatatgaattatttaaaaaaacaattattcttatcaagtatattttataggtatggtttagatcgggagcaagtgagtttgcttgtacttcttatgtccttttattcttactgtttatcccatctgctttcctttaaatgggcacaatttagactttatatcctaagaattctctttgaygagaccatagccatttctatccctaatttatgtagtggatacattataaatacaaaaatttaggccaggcgtggtggttcatttctgtaatcccagcactttgggaggccaaggcaggtggatgacttgaggtcaggagtttgagaccagtctggcctacagggcaaaaccctgtctctaccaaaaatacaaaaattagccgggtgtggtggcacatgcctgtaattccagctcctcaggaggctaaggcataagaatcgcctgaaccttgaagcggaggttgcagtgagctgagatcgagccactgcactccagcctgggtgattgactgagaccctgtctcaaaaaaaaaaaaaaaattaaagcaactagtaaccaactaatcagaatctctccttttggccaatagaggccactgtatggtggagcagtatgacagaaataaagtaaattgagcaatattactttacctgaggagggggatgtgtgtgtgtgtgtgtgtgtgtgtgtgtgtgtgtataaaacattgagcttactagctttttaaaaaacttttgttaaaacagtattgttgaggtctaattcacatgcaataaaatttaccatcctaagtataaatgatttttaataaatttatagttacacagccataactacagtccagtctgagaacatttcatcacactaaaaaattctctcatgtctctttgcagtcgatcctatttccattcccaaagccctagccagccaaatactaatttgctctctgtctctataaatttgctatttctggacattttatatatatggaataaaacagtatatagtcttttgcatctagcaccttttacttagcataggcttttgatattcattcatatatatgttgtagctggtatcagtagttcggttcctttttattgctgaatagtattccattgtatggatataccacatgttgtttattcactcaccagctgatggacacttggattgtttcaagtttttggctattatggatattgctgctatgaacattctcatacatgttatcagtatggatatttgttttcatttttcttgggtagatttttaagaatggaattgctaggtcatatggtaagttgatatttaactttttttttttttttcacttaaaataaaatagagatagggtctcgctttgctgcccaggctggtcttgaacttctgggctaaagcaatcctcctacctcagctttccaaagtcctgggattacaggcgagagccactgtacccagccaatatttaactttttaagaacctaccaaactatttgctacagtgactataccatttttatagtcccatcagcaatgtattaaggttccattttctctacctattcaccaacacttgttgtcttttaaaaacatttttttaaaattgctccttgcagagcagggttaactcataggtagtacacccagagttggcttgttgtcttttttattatagccattctagtgggcgtgtagtggtatctcatatgtttatttatgtatttatttattttttgagacacagtcttgctctgtctcctaggctggagtgcagtggcatgatctcggctcactgcaacctccacctcctgggttcaagcaattctcatgtctcagcctcccaagaagctgggattacaggcatgcactaccacacctaggtaatttttgtatttttactagagacggggtttcaccatgttggccaggctggtctcaaactcctggcctcgagtgatctacccacctcagcctcccaaagtgctgggattataggcatgagccaccgtgcccagcctcgtgtggttttaatttgtattttcttactgataatgatttaaacatattttcatgtgtttgatagctacttatattgggtgaattgtctattcagtctttgctcattttaaaattgagttgtcagccaggcatggtggctcatgcctataatcccaacactttggggggccaaagaaagaggatcacttgaggccaggagtatgagaccagcctgaataacatagtgagaccctgcttctacacacacacagacacacacacacacacacacacacacacaagtaaaattgagttgtctttttaatattgtcagattctttataaattctggatgcatgttctttattggatatgtgatttgcaaatattttctcctagtatgtggtttctctttccattttcttaaaagtatcttctgttttacaaaagttgttttgttttgatcaagtttaatctattattttttcctgttatcattcatgcttttcccactaaatattttcttttttaccgttgtgaaatgaaattattgtcrttagtttatttccaaattgcctgtttctggtatatatagctataactaatttttgtgtattgattttgtatcatttgaattaatcagtgaagccattttgtagctgggattttttgtaggaatattttaaattagtaattcaatttctagttgtatgtcaatagctttttaaaaacagctttattgagatataattcatataccatacagttcacccacttaaagtgtaaaattcatctgttgcttttaaaacattttcgtcatctcaaaaagaaacctcccacccattagcggtcaacctcatatycctctatatccccacctctacccctaaacaaccactaatccactttctgtctctacctatcacctgtcaatgtaatatccctcaatatccccaccagcagccctaagcaacaactaatcaactttctatctctatggttttccctattctgactttcgtatgaactgagtcatgtaatatgtgatcttttgtgactggcttctttcacttaacataatgttttcaagtttcatccttgtagtagcatgtattagtatttcataaccttttaaaaaataaagtgaaattcagataacatgcaattagtcattttatttttattttttgagacagagtctcgcgcagtcaccccagctggagtgcagtggcgtgatctcagcttactgcaacatctgcctcctgggttccagcaattctcttgcctcagtctcctgggtagctgggattacaggagcccactaccacgcctggctaatttttgtatttttagtagagacagaatttcaccatgttggccaggctggtctcgaactcctgacctcaggcaatcctcctgcctcggcctgccaaagtgctgggattacaggygtgagccaccaggcccggccgcaattactcattttaaagtgtacagttcagtgacaattaatatattcacagtgctgtgcaaccacccctccctggtttcaaaactttttcatcactgcagaggaatacctgtaccatatgtaagtaagcacttctcattctcacctcccctggcaaccactaatctgctttttctctattgatttgcatattctgaatattttaaacaaatggaatcatgcaatatgtgaccttttgcatctgacttattttatttagcataatgtttttgaggttcatccaagctgtagcatgtatcagcacctcatttctttttctggctgaatattattccattatatggatttaccacaattcatttacctattcatcttttgtttctgctgtctggctattatgaataatgcttcgataaacattcatatacaagtttctatgtggctttatgttttcatttctcttggctatctacatgggagtagaattctaggtcataatataattttatgtttaacttctcaaagaattgccaaaaggtttttcatagtggctgcatcatttacattcccancggcaatgtacaaggatttctatttttccatatccttgcacttaccaacacttcttttttgttattattttgttttttcattattgccaccctagtggatgtgaaatggcatcttattgttttgatttgcatttctctaatgacaaatgatatcatactttttttatgtgcttacggatcaaaggtatttccttggagaaatgtcccttcaagtcctttgccatttcaaaatttggttatttgtcttttattattcagttttaagaaattctggccaggcgcagtggctcacctgtaatcctagcactttgggaggccaaggcgggcagatcacttgaggtcaggacttcgagaccagcctggccaacatggtgaaaccccatctctactaaaaatacaaaaattagctgggcgtggtggcaggtgcatgtaatcctatctactcaggaggctgaggcaggagaatcgcttgaacccaggaggcggaggctgcagtgagccaagatcacgccattgcactctagcctgggtgacacagagactgtctcaaaaaaaaaaaaaacttcatatattttcagttagttatgtttcatcagatacatgatttacaaatgctttttcacattttttgtaggttgttttttcactttcttgatgatatattttgaagcacatatgtttttagttttgaagttcaacctatttttttttatttttacttccagtgtcatatataagaatcctttgccaaatcaaggttaggaagctttatacctatattttcttctaagagttttgagttttacctcttacatttaggtttatgatccattttaagttaatttttgtagatggtaggagagtccaacttcattcttttgtatgtggatatccagttatcccagcaccatttgtggaatagactgttctttcctgtgttaaatggtcttggcacccttgttgaagatcagttgactatagatacatgggtttagttaaatccatagatgtataggtacagttaattatagaattaccaaataactcacaatttctacttgtaaatatatactcaaaagaattgaaaacaggcactcgaacaaataaatgtacatgcatattcacagcagcgctattcacaataggcaaaagacagaaacaaccyaaatgtccattaagggatgcatggataaacaaagtgtggttatatacatataatgaaatagcagtcagccataaaaaggaatgaagtactaatacatgctacaccatgggacattatgctaaatgaaaaaagccagacaccaaagatcacatattgtagaaatccttttatattaaatatctagaataggtgcatccatagacacagagagctgttggtggttgccagagtctggaggcagggggarctgctaatgctgaatccctgagggtttcattttgggatgatgaaaatggttgaaactagatagataccacgtgttgcgtggtggtacacaacattgtacctggacttaaatgccactaaattgtttctcttccttttcttataagggcactaatcccatcattccggctccatcctcatgatttcacctaaaccaaattattttcccaaggccccacttcctgagaccatcacactgagggcaagagcttcaagatatgaagtttgtggggaatgccaacattcagtccatgacactaagcaaagtcttcctgtactcttcccacagcttcttgatgcagttttctacgttgtcaaatgtatcascttgtgtcagtccactttttccccggagccctttgtcttcatgttataatctagacctgaagctcattaagcctgctacacagctgttgtcctagaaatttaactctctcctgcactgaatctcctgtttcctggatcccatgtcttctttcttcctttacatcttcattttggtggcacacattgtccagtagtttcatgaaaaaggatacattagagataatttttgtgtgtatctgaaactactattattctaccaactctcttgattgtctgggtagagatttccaggttgcaattcattttccctcagaattttgaagccattgctttatcatcttaagattatcgttgagaatttgatgttgttcgtcttaatcttttctatctacccctgtcctttctgaaagyttttgaaatcagagacatatttctctgtggtagtctgatatttcacagtgataaaaggtaaatgtcattttcccagccccttgaaaagttcttatattatttctttgatagttctctcagttttctctcttctgactttctggagaaaaagatcakctgatttaatcactcatttctcctattacacatatatttgtataattcttttcaccttctaggagatcgactcaccttctttttcctacctttctattgcattttaattttgttgactaaaattttactttctaagagctcatcttgttttctgatggtttttcttcctcctcctcaatccaacccatcccctctccttccctggcatcactgcctttccccctttccctttttctcctctctccctctccttcatcccctcttcttctcctctctccttcctgtgctcctcctcttccctctttctccacctgcatcctgttccccatcccttgctgtattattttcttttatctctgagggcagagattgtggaatttttaatttgttctccatttactctactttagttatcttttgtctgagccagcattctgtttcctccaagttgctcttatctgtgttttggttttggttatatttgatgtccattcatctctatgggcaaggctctgcaaagctcattggaagatgtgtgtgagtggggtgggtggaatggtaggcttcactgtagaataacagagcatgatccagttgatttagctgaaggacacccagatgtctgtatctgtgtttttggacgggctgttctgttccttccagaataaagatctttcagtatcctccatgtaaataaaagttaccccttcatttattatttgtaagtattgggattttaacatcacactgtcttaaagtaggacacagctcagtttattcattaaaataaaagagttggacttgatcctttctacctataataactccatgaggctttgctataacctctatttagaataatttaaaggcatttaatagcttaatataatatatatataatatattaactcacacactttctctgcaaagaacctgtgtggggcacaggggtggggagggtggctactaagctactaataaaccaaacacatattgtgccttctagaagatatgtcatctatatcaattagcataatgtaagacagaaaatcataaatgaggctgggccagatggctcacatctgtaatctcagcactctgggaggcaggtggatcacttgagaccagcctgggcaacatggcaaaaccccatctctataaaaaattagccctgcatggtgttgcttgcctgtagtccagctactcaggaggctgaggtgggaggttcagatgagcctgggaagtcaaggctgcagtaagccatgtactccactgtacatgtactccagcctgggagacagagtgagaccttgtctcaaaaaaaaaaaaaaaaaaaaaaaggaaaaaaagtcataaatgaaaggcagacatacctggctttaaattgcagcactgcctcatacaagctgtgtgaccttgagcaagccaaaatcctttttgagtctgtttcctcattaattccactatgtgatagaccccgtactgacactggaataagagtagcagataacaaatgtacttctctccatggagctcatatttattacatgttgttattaggtacaattctattttaatgcttacatttttttataccctggcatttctgtggttaaagtaatgctaacacatattttgtgtccatacactatacttttaatgatcatttcttaagactattttgttcatttacaccatttggttttttgaacttgaaatgtcaaaagtttaatgaactatcgtaagttggaaaattaactaaaatagacagtatttgtttaccagaattcatttgagggccgtgtatcctttagtgtataaaaatctttttggtgtaaaaacatttgctataatcttttgctgattgttgtttttatgctagctcttaataggatattgttaacatctaagtctaggaattgggattcccaagatactgatataaaatgctgtaacagaaatttctatgcttctgaggtttatagaactcaaggagattctttttacaaygcgtgttcttaaagcaatatatccctaagggcactaatggttgcttttccctctctcattttctcattttagggaaactaaaaccaacaatggcattcatgtcagggaaattgaagattaaaggtaacatggccctagcaatcaaattggagaagctaatgaatcagatgaatgccagactgtgaaggaaaatataaaaaaaaagtcgactgctatgctcaaaaagtaaaaaaagctcaacagttaaaatctaatgtttgttttctttcctgttatattataaggatatgcacgtttgttctggaaaagatagaatttgtctctaaaagacttgaaattgtaattaaaatggcaagctaatcaaacataagcttcattaagtgggattctaagacagtctgtgtttttatatttcaagggtttaaccctttgagccttacatctcattcactgtctttctccaagaaaagtattttgggcggacagtcagatcaagcagtaaaattagctctttcaaatcttcttgtcatgtaaaatgaagctagtctgttttaaaatttttagttttggattgtatactaatgaaaatcttaatgatgtttttgatttttatatacttattttaaagaaaatcttatatagtacattttacaaaaattataaaaaatgaattagtactggcgaggactaaatgaaacaataatttttcattttgataactagctttccaggtggacttagccataggaaaatattactaatgtaatttaacaaattgctgcatgtattccatttaaaaatatgtttaaattgtcctaaaacaaaataattttctccctaggagtatgcatttggctacagtgttttgaaacagaaaccttagaataggtcattggtatgggctgaactgtgtatcccccaattcatttgttgaggtcctaactcccatttcttttgaatgtgactgttcggagatgaggcctttaaagaggtgacttaagttcaaaggaggctgttagtctaatccaacatggtgtcctttggacataagagataccagcaatgtgtgcacagaacaaagaccaggagaggacacagtgagaaggcagttatctgcaagcaaagagagaggcttcagaagaaacaaaatcaccagcaccttgatctttgacttctaatctccagaatagtgagaaataaatttctgttgttaagccgtccactgtgggaggccgacgcaggaggattgcttgaggccaggagttcaaggccagcctggacaacatagtaagaccctatctctacccccctaataaattaatttaaaaagccccccaatctgtggtattttattatggcagccctagcaagctaatacagtggtttgagaggctgggagggttgaggggaagataaacttttaaaaagctcttatctttcatttcaatcagttaaaaatacttgctcagtgtaacaattttgcttctcagcttccactctaatattgttgtgccattaagcaatttagctaatcctgacatttcttagattcataatgttaggagcatttaatctgtattttacaagttaggaagcagaggatcagagatgggaaaggactagcccaaggccaacattaacaagccctctaacaaaaactttacaatacatttatgttgaatggaactccaagatctcacctctccatccaggaatggagtccatgtaatcaaagtgaacttaaaaataggacastttcaacaagtcaggagattcacagcaactgatcaaagggagtccagtcaacgtgagcaagcgtgattatgatgaggaagccccctctgctttaatccacacaaggaacgtaacctgaagtaacctgatgttaaccaatctgctgtgtctactatgctgtttccttgttcctgctagtgctgctttacaaatgcagaccattctatcatacctggcrgggcttctgttttattttgtaggctggatgctacccagttcatgaatcgctaataaaagccaattagatctttacataatttgttgagattttattctttgacattcttaaaggtttgggaaaattagaggtagaacataccgtgaggcagcaatctctgggttctggtcattaaaatatgaatttgctaattatacctatcccaacagggggattgagtcaagggaccttgcccttttctggactgacctgcttgattattgccctaagtgattgttagttaggttgcccattggaatctctgccttctggctttaaaaatttttccagattggagtaaattgagctgactggttttgagctttgtaatgttaggggaccagcaatgagttcctctgatccatccaatcattagtagattaaatctttgttttaaacccatcacagtccactattcatccctttttaaaataaccatttaaaaattttytaccctgaattgcattttgaaagggatggttcctaggtaacacaaggtagaaaatttacatctcaaaggcagagaacttacatttcaggcctaaatattgttatttgccaagacagaaagttgatgctaagaagcccagttcagacaaaatggttgaaggtgagtttatttggactaatgctctcacctattgtaagaatttctactgattttcctttatagatacacgtttttacaaagagtttcaaaataactggctaaataccagaaacgcaaattttggagactgatttaattcaataggcggtcttttcaacttagcttctgtttcttaactagattactgagttcagggcagagcccattagcaaatagagcagacaaagggtttcctatttctggatgcagatggatagttctgaaaatgcaaatctgcttcacccaagggcctaatttttataaatattacctagctttctttttgcctttggagtaaaacagtaactaagtgaaaagattggcagattcaattttcttataaactagttgcttaaacttttcatttgccttctacgtgagctcttttaaagagacaaacatttttgaaatctttttagaagcttttgcacatcaataggtatccctaggagggcctgattcagaagccctcatttttaaactcaattcttagatgaacagtcttattcatctggaatgttccacataatggtcatcataattctaatttatctttagtaagatttcaccatttttgtaagtatttgcagcttctaggccctaacacatgtaaaaggtaaacatagccagaaggtgaaatacacagttctttaaaaatttaaggatgctggccaggcgaggtggctcacacctgtaatcccagcactttgggaggctgaggtcggaggccaggagtttgagaccagcctagccaacatggtgaaaccccgtctctactaaaaatacaaaaattagatgggtgtggcagtgtggcctttaatccagctacccaggaggctgaggtgcgagaattgtttgagcccaggaggtggaggttgcattgagctgagactgcgccactgcactccagcctggacaacagagtgagatgctgtcttaaaaataaaaaaaaagaattaaggatgccatttttaagttgaatcttgagtctctcagagtcaagataaaagtctgagtgaaacgccatgaggttgggtcactgtgtttgctatctatctacctatctatctatctatctatctatcatcatctatcttatcatcatctatctttatctatctatctatctatctatctatctatctatctatctatttttgtccaggtttcctggcttgtaattcccatagcccttgttacaagcttttgttacaatgttgggtgttaggccttgcaggcaggcctcaggaaacagaatctctctgaccttctcttgccttcctttcacttccgcaaggcagaactgtgggtcatataaacccttattccagagagggtcctgctccatatgctgggggaaagaatgccaacttaatgaagcatccataaaaacccaagaggactgggttccaagagcttctggatagctgaacacatggagggtcctggagggtgacacaccccgggaggactggagagctctgtgccccttccccaatactgtgccctatgcatctcttcatatgttatcctttatgattttctttgcaataaactggtaaacgtgtttccctgagttctgtgagctgcaccagcaaattaatcaaaccccaagtggaggttgtgggaaccccaacttgaagccagttggtcagaatttccagacacccagagttacaactggtgtctgggaggtggggcagttttggggactgagcccctcgacctgtggcatctaacactatctacctggagacagtagatagtgggcaacatggtgagacccactatctccaagtagatagtgtcagaataaaactggaggacacctacttggtgtccactgcttagcgtgtgggaaaaactctcacacatttggtcacagaagtcttcttatgtgttgatgattgttgttatgttagtatgagagcagaggaaaaatggtttagagttttttcccaaaacagtcatgtaatgctatcatagtatacctcagtgcatagatgttttattttttctgccactcattctagagtgcagtggcatgctcatagctcactgcagccttgaattcctgggctcaaggtcttagctttccaagtctcagctttcctgggctcctgcctcagctttccaagtagctgggattacaggcacataccaccatgcctggctttgtttgttttttgtgtggacaaggtctcactttgttgcccaggctggtctcaaactcctggcttcacgcaatcctcccacctcagcctcccaaagtgctgggattataggtgtgagccaccatgcccagcctaaataattttttaaattccagtttttaattattctttgttaggatacagaaatgctttgtgtcctgcaatactgttaaatctccttattagttttagcagctttttttgtaaatcccttaggattttctatgtatgtgattgttatctgcaaataaaggcagttttatttcttcttttccactctgtgtgccttattttttttttcttgtcatattgcactgttagacccacagtatagtggtgaatattggtggtgaaaatggatatcctagccttgttcttagtcttagggggaaaacactgtgttttttcaccattaactatgatagttgtagggcggtttttttgtagatgcacattatcaggctgattgttgtttatctgctgagtattcttaatcatatatgattgctgaattttgtcaaatgctatttctattatctattgagatgattaggttattctcctttattctattaatatggtcaattaaaatgattttttaaaattacttttactttttttagagatgggctcttgctgttacccaggctggtctcaaactcttggtctccagcaatcctcctgctttggcctctcaaagtgctggaatgacaggtgtgaaccactttgcctagtctaaaattattttttaagttaaaaatatttattgtgctgttttccccaacccatgtttgttgaagccaaatgtacttaaatagagacaaatagctgtatctaggggaatgatggcagtttaggaagtatcaggcttcactcccagccaacagaaaagttcaactagaaactatccacaggccagaaaatccttttgtaaaccccaatacttggaaacaagtttgagacacacatggtccacagaacggaatgaaatctgaattagaaggataaggaggacagtctcccccccgcccccccgccccccccgctttttaatagactgtgtctcactatgttgcccaaggaagaatggtcttattccaactgtggcacccctttccctccaagtcagcacaatgccagacagaaaagattctcctggcccacagtttctactaggggaaaacagaaattgaaatagtcatctagcttccctagcattctgagatgtttcccaggcagcccactgtggtttcccctacctacccttggggaaatggcaccactacacaactcagggccaggtagaaacaatgagaggaggcagaggtcatagtaaccagcacatggatcttggtaatacctctacgtttctgccagctgtggcaccagattagagataccagccagtctcaaagcccacccacaaagctgagctggtcaccttcagaagcatggtgggaatttcaagctagcttgagtccctagatagctagtctctgtgcccagcctcggagcccaccccaacaatcctactcaagcaaggaaactcctgcctccatgcactgagagaaggagctagaccagcttgacccaggaagtcaaatgaagatctactcagccctcagccaaaaatcccagctaacaatctacctaggcaggaagactcccacctccgaacgtttaagaaatgcaaaggggccagactggcttgacctgagaggtcaaacaaccactcaactcagctaaaagcctaccccacagttccaccctgacagggaggcaatcctcaattgtgctttttttttttttgagatggaatttcgctcttgtcacccaggctggagtgaaatgacacggtctcacctcactgcaacctctgcctcccaggttcaagcaattctcctgccccagcctcccgagcagctgggattacaggagactgccatcacgcccagctaatttttgtatttttagtagagacagggtttctccatgttggccaggctggtctcgaactcctgaccttgtgacccacccacgccttggcctcccaaagtgctgggattacaggcgtgagccaccgcgcccagcctcaactgtgcaattctaaggagcatagcttatgattccacttgtcccaagcaatgactccacctaacttccaaccccagcccgcagccttgcctaactgcagatcccaaatatcagaattgcttggctagggaatatatcctgtgactaacctgaccaaaagccatcacagtacccagccagcagctctacacaatatcagagcaaaggcagtagcccagtcaactagagaaatcacaacaagctctgcctgtctggggtcattccagcttatctgggagctggcccttccagaatcagaggctaaatagagaaggtctattcctgccaaagaacacctgcaaaagccagaagagggggcggtcttcttcttcttctttttttttttttttgagatggagtctctctctgttgcccaggctggagtgcagtggcacaatctcggctcactgcaagctccacctcccaggttcacgccattctcctgcctcagcctcccgagtagatgggactacaggcgcccaccaccacgcctggctaattttttgtatttttagtagagatgggatttcaccatgttagccaggacggtctcgatctcctgacctcgtgatctgcctgccttggcctcccaaagtgctgggattacaggcgtaagccaccatgcccggccaggggtggtcttaaatgctcagacaacaatgcaaggacacaaagattgcaaagaatcagtgaatcacttccaaaagacaataataaagcttcaataatgggccccaaagaaatggagatctaggaaatgacaaagaattcagaataataaagaagttcagtaaactataagaatatatggatagaaaatttaatgagatttggaaaacaatacacaagaaatttgagaaagaaatagaaacaataaaaaagaaaattctagagatgaagaatacaatgactgaatggaaaaattaagtagaaggcttcgatagcagactcgatcaagcagaagaatagatcagtgagctggaaacagaacatttgaaattatccagtcggagaagcaagaagacaaaagaataaaaaagaatgaagaaagcctgtaggaattttgggacaccatccagagactaaaactttgctcaacagaaattttagaaagagtcaaagagccagaaagcatatttaaagaaataataggccagacacggtggctcacgcctgtaatcccagcactttgggaggctgaggtaggtagatcacttgaggtaaggagtttcagaccagcctgaccaacatggagaaaccctatctctactgaaaatacaaaattagccgggcatggtggtgcatgcctgtaatcccagctactcgggaggttggggcaggagaattgcttgaactcgggaggcggaggttgtggtgagctgagactgtgccattgcattccagtctgggcaacaagaatgaaaactccatctcaaaaaataataataataataaaaataaataaataaataataaatgaaacttccttaaactggggatagacaccaacaagcagtataggaagtacagagttttccaatcaaagaggaatacaacccaaagaggagtatatcaagacacataataatcaaactaccaaaaatcaaagacagaaaattttgagagcagcaagagataagaaacataccacatacaaaggggtgctaatgtaactaccagcaaagttttcagaaattttcagaaatcctgcaggccagtgggatgacattcaaagtggtgaaggaaaaaacctgccaaaaaataatactttatgcagcaaagctgtctttcagaaatgggggagaaataaaaaccttcccagaaaaacaaaagctaagggagtttatcaccattaggcctgccttgcaggaattgcttaagggaattctttaaactgaaaccaaatagctgtatctagtcaacataatggtatataactagtaggatgctatggtctgaatgtctgtgttcccctaaagtttatatgttgaaatcctaatcccaaggtgatggtattagaaggtgcagcctctaggagatgattaggtcatgcagatataaataggtaatatgacctcatgaatggaatggtgcccttataaaagaggcccaagaaagctcccttgctctttctgccactggagattacagggaaaagatggtcttctatgaagaagtgggcctccaccagacaccaaatctgcctgtacaccaatcttggaatcctagctcccagaactgtggaaatcaatttctgttgttcataatccactcaatttattatattttgttacagtagcctgagcatactacgacatgcgatcagatttttttttttttttttttttttgagatggaagtctccctctgttgccaaggctggagtacagtggcacgatctccactcactgcaaccgccaccacccgggttcaagccattctcctgcctcagcctcccgagtagctgggattacaggcatccgcttccacgcccagctaatttttgtatttttagtacagacggggtttcaccatcttggccaggctggtcttgaactcctgacctcgtgatccacccaccttggcctcccaaagtgctgggattacaggtatgagccaccgtgcccggccaacatgggacgagattttaaactttacagcacacaaatctcttattttagactttttatcctccttatgatattcttttccaggcaattgtttctaaattctgagatgtttaagtcaatataaagatggtaaagattcttgacaaaccaaatactataataattactgaccgggcactgtggctcacgcctgtaatcccagcattttgggaggccgaggcgggcggatcacgaggtcaggagattgacaccatcctggctaatacagtgaaaccccatctctactaaaaatacaaaaaattagccaggcatggtggcacgagcctgtaatcccagctattcaggaggctgaggcaggggaatcgcctgaacctgggaggcagaggttgcagtgagccgagattgtgccactgcactccagcctgggtaacagagcgagactccgtctcaaaaaaaaaaaattattattattttacataagaagaaacaatgcaatgattgatttttgagtgaaaagttaactttatatttctaggaaaaatcccatttagtcatattgtattacttatgtattggtggattcaattttgtatttgtgtccatttgccatattggggctgtagtttttgttgtttatttgtttgtttgtttgtttgtttttgagatggagtctcgctctgtcacccaggctggagtgcagtggctcgacctcacctcactgcaagctccacctcccgggttcacgccattctcctgcctcagcttcccgagtagctgggcctacaggcgcccaccaccacacctagctaattttttgtatttttagtagagacggggtttcaccgtgttagccaggatggtctcgatttcctcccacctcaacctctcgatgacctaggaccaccagcacacaccaccatgcttggctaatatttttatttagtagaggcgaggtctcactatgttgcccaggatggtctccaactcctgggctcaagcgattcacacaccttggcctcccaaagcactgagattacaggtatgaaccacatgcctggcaatgattttttacaaaatactttatgttttcctttattttcttacttattttttttttgggcggctgggggagggtctgttttctgttttacttgatttctactatcttcattatttgttttcttctactttgtgtttaatatgtcctttcttgtagcttctgaagattaaaacttagttcattctcttgggccctctttttcttatgatacaaacttttaagccataaatttcacttttagaactgccttagcattttcccacaaacatttgatacattgtgtaatttttcattcgcttcgagagattttcctactttccttctgagttcttctttaatcaacgaggactatagaaacatgtttaattttcaaatattcagagtttccagatattgatctataattgatttcaaatttagctttacagtgggttagaaaaatata

SEQ ID NO: 95442 - DNA, 31018 bp, Homo sapiens
gcctggctgccaggaaggccagccaaatgactcaatcacacctgccgcccccatgactcccttcatccccagctcaacacagacaccatggccacctcagacagggactgtccggcagaaggtacacacgtcgtagggtgtgaggccttcagctcgggaaggctccctggggctcagctgttcactctgcctctctggagccctcagcttcctcatctgtgcgggatacagtgcctagatcatcagagctaggcctagacccatttaaatctcccaagggcagtcccaagtggttgccatgactatccccctcacagatgaagaagctctgggcaataggggctgatggcttcacctctctgatcttaggtagccagatccagcacctcctcttggtcattaggtggcgaggccactccctcctaagagtgagctgagtgggagcaataggagttggggttcaggatgggcttagccccttctgtaggcaacggcgccccctgccagctgcacagcacctatcaagctgctcagggcctcctttactccctagctgtaagtttttttttttttttgagacagggtgttgctctgtcacccaggacggagtgcagtggcacaatcatagctcactgcagcctcaacctcctgggctcaagcgatcctcccacctccgcctcccgagtagctggaaccacaggcatgcaccaccattccccactaaatacacacacacattttattttagagacagggtcttgctatgttgcccaggcttgcctcaaaatgctgggctcaggcgatcctcacatcagcctcccaaaatgctgggattacaagtgtgagccaccgtgcccggctagatgtcttgagaagtaaattagagttgtcccttggtatccacaggggattggctccaggatccccatgaatcccaaaatccatgaatacttaactcctttacatatatttttttactttgttttttaaactcaacttcagtggctgagatcaagtctcttatataaaatggcacagtatctgcatttaacctctgcacattcttccatatattttaagtcatctccggattactactgtaatacctaatacaatgtaaatgctatgtaagttgttgttagactgcattgtttagggaataacaacaagaaaaaaagtttgtacatgtccagtacagacacagtcatcctaggcctaactacattttcgatccacagcgggttgtacccatggatgtagaacgcatggataatggaggtctgactacatttattctagaagcccatttcctgtccgaaaattggggataaagaatagcaagcgaggtgtgatggcacatgcctgcagtcccaagaattcaggaggctgaggcaagagaatccctggaacccaggcattcaaggctgtagtgtgctataatcatacctacggatagccacagtactccagcctgggcaacatagcgagattctgtgtctcaaaaaaaaaaaaaaaaaagagagagagaggatagcaattgctgcatagggctggatggagaactgactagatagtaagtgtaaagccctcgactgaattccactcttaggataggctcaatgctgtcagcaggccctcaagaacagatctgcaaaatggccaggatccctactgaggcttctctgcccacaatcatatctgggcctcagtagggatgaggtggggttgggcactgcttcttaatattgccatttatcttcagagaatgagactaaagcaggaaggatgctccccctgggaaagtgatcctaaccagctaagccaaggtctaagccctacagtctgtccaggtgaccaaatgcaatctgggcatagggccaaggggaggcagaggccttagacccgagcacgtcacttcacagtgctgagcttccctcttactcaacactgggggtgacacatgcctttgggagggctgattgagagggtgcctcaggttcccttcaacagagaagtctgatgtcactgcccttatcagggaccagacggccatcactaacagctggaaaagctggcatcacacacctactagtgggcttataaaatatatatgccactcctgggcagggttttcatcaaaaagcgcaaacctggactcactgaggcctttagaccaatttccagttaaaggcaacacaaatcaggaacaaatcagactgcagaactgggacttctctgaacttttccaaacaatcactgtgaaaaaagacaaagggctgggcgtggtgttcacacctgtaatcccagcaggttgtggggcttgagcctgggagtttaagaccagcttaggcaacatagggagacccagtctctacaaaaaattaaaaaattagcctggcatggtagcacacgcctgtagtcccagctactcgggagactgaggcaagaggatcacttgggcttaggaggttgaggctacagtgagctctgatcacatcactgcactccagcctgggtgacagagcaatacactacctcttaacaaaatgtttttttgaattaaaaaaactgaaaaacagctaggtgtgatactcaagcctgtaatcccagtgctttggcggaccaggtgagagaactgcttgaggacaagaatttgagaccaggctgggcaacacggcaaggcctcatctctacccccaaaaataaaaaataaaaataaataaataaataaataaataaatattcttttgattgggctggttggggtggctcatacctgtaatcccaacattttgggaggatgaggcaggaagatcacttaagcccaggagctagagtccggcctgggcaacctaggagaccctgtctctacaagaaaattaaaaattagccaggcacggtggtgcatgcctgtagtcccaactattcgggaggctgaagtgggaggatcgcttgagcccaggaggtcaaggctgcagaaaggtataattgtgccactgtattccagcctgggcaacagagcaagactgtgtcccctcaaagaaaaaaaaatttggccaggaatggtggtgtatgcctgtaatccaagctacttgggaggccaaggctggaggattgcttgaacccaggagttggaggctgcagtgagctacaatcttgccactgcacctgggcctgggcaacagggtaagaccttgtctcaaaaacaaaacaaaaacaactatgatgacacattagggaaatccagatatgcctgggtattagatggtgttgaggaactgttcattttctgatcagataaaagtattgtggctatacaggcttatattgactataggagctgcagtacttcaaagtgaagagtcaagtctctgcagcttacttactgatatttatatatgcacacataaatatggccagtgttgcaatatgtcaacaactgttgactctactggtggtggtgagcatacaggcacattcgtacactactctttccattttgattttattttacgaaaagttgcaagtacaccaccctttagaggcacttactaccaccatccccccctcaaactccaaatgactccaccaagatgaaagacaccaaggcatgctgggaactgaatataaattaactttattacaaaaagcaaaatgttagtttctcattgtgagtgattcaagaaaacaacggtaacagccctggcaggagctgggaccaggataccagtatgcaggctgaggggtcaaaggccaggctcaggagcgggctgacaggcactgattcacaacctccaagaggtgggtgttctccagggcagctgccacccgctccttatctgcaagttgcttgttcactaggtgggaagaagggtgtggggaaggcagagtcaaagctaggctctggccagagtgctagccagccctacctctgaacctctatataggatatgtcccccgcagcaacagagccctcctgtcacctccttcccaggaccccacatattgatcaggctacttcaaccacctgagcccacctaatctgccttcttaggatccctccccctggctgcctcctgcgctgctgaagcctgacacactctggtcctgtatatttggtgagaggggatttgggagaagaggacatggtaagcaaaggagagtcttctcaggccagcttcggtctaggctataacccatactgaggagtctctggcaatttcactcacacagttacccatctccagtcttgcccatagactcctgtgcaagggggaagcctcagactgcttagggggtgcccgggccaacaccctcaccaccagtccacacttacctgcatgctctgaggcatgggtccccggagtaatgtgcacgtccatctgggagggagataaccagggcctgaacacccacccaccgacccacacttttccctgcagcccccagaccctcaggcaccatctccagctgatccttcctcctaatcatgcctttggactctggcccttccgttacaccccaaacccatccacaggtattccaattctttttttttttccaagactgagtcttgctctgttgcccaggctggagtgcagcagcgcaatctcggctcactgcaacctctgtctcccaggttcaatttgattctccttcctcagccacccgtgtagctgggaccacaggcacacaccaccacgccccactaatttttgtatttttagtagagatgagatttcaccatgttggccaggctggtctccaactcctaacctcagatgatccacccgcctcagcctcccaaagtgctgggattacaggcgtgagccaccgcgcccggccctagctattccaattctatccaaagaactggcccactactgttgatttaaaggcctgcctgtgccccacccctggtccaaacccatctgccgctccctactgcccttcctgccacactcttcaatacttttctccactttccagctcagatctttattcttgtcacatcgacttggaaagcttcctcccagtttcctctctgctaatggggatccttccaggccccactctgatgtcctatccatgttcatgctctcccagtccccatcctcagcagtagaccctcaatgcctggtctcactcccggggctcagctccaactgaccttgaaacgctgaggaagggagcgcagaagcttgaccttgatggacagaccaataagggtggccatgctgcagtgcggaatggttggtgtgaaagccacagccactgtactctcggggtcgctaacctggttgtggaggagagatgtcaagagtcaaccaccctcagcccaaggtccctcttcttagtttgttgttttgggcaaatcatccaacttctatgggcctcagtttcaacacccataaaataggcacaacaatctccctccccaaagatacccttcggtgttcgtgagcatagagcacgccagctcctgctgcacagaaacctttctgactctctggaacaactcgctcccctcggaagtgactcacctgaacccgcacctgctctactacgttcaactcctctagcgtcagtggatgctccgggtcattgatggagcgaatcagatgtgggaagtgaaggaaaagggactctgcgcccttgcccacttagaaccctctgccaggaacgccctgctgggatgcggctccaccagctgctcgatatcactgctccccccaccgcaagcccccggaacccgcccgcgcccagcagcggcggatatcgaagatctcgcgtgcgtcgatgctgtcgggaacctgctcgtcctcctcgcctgccgtcacaggccgctccccagagcgctggtagatgagggggttggcattctccaggaggccgccgccgaccccgccgccgcctaccatcgcggaaccaccaccgctgatcctagcaggcgtgcgcttccgctccaacccgcgcacttccggagaacgggaagggggcgtggcgtggcgacggagtcgcgcgagggacacgccgcgttgtgggttctcggcctgaggtgcgagagaagcggtgaccgcggccctggctgctcggacccgggaacatgatggtcgctggagcagaaggcgctgagaagggaccacggcggcgctgggtcgtgcgagccagtagcgggctgaaacgtagaggccagaaccaggtctcagggggcactaaaggcggtcggaggtaatccccacaccgcttcctcctggaagtcaggctggccgggagctccygtatccaggacggttggtcgcctctggcctggcagggatcctagtgtctcgggacctcccggtgacgcgcctgcctcccctgctgcaccataggcccgggagtacggcgtccccacagcttggaccggcaggggctcgtgaaatgtttgtcaagtggataaatgaccatggccgtggtctccgcgggaggtgaggaaactgaaagccaccgaggaaaaggggggcgctccttaagaagtgccgcggtcacgtgtacgtttcaaaagaatggcgtgactgagtagggaggggaccgcggagaccctcagaccctggactgtaaggagatgaggggccgtgaaggggaacccaggaaactgagtcctgaaagcaaggaggaacttccagaatgaagggcgccgacactccttcctgcctttgctcaagcggttccttcaccccgatcaagttccttcccatttctccatctgggggatcctgaacgtgcacatcctcagagaagccctcctggggtctccaattctagtttattgccccctcctatcgatsccccagcgcgctcatcgggcctgtggacaasgacaggtttgaagagaggattccctggatcgcggaagggctgcaggaatggcacagccccttccgaggatgccaaaggagcccgggcaaaggaaagtggccgtgcccgggcctgcctaccactagatccccacccacctatgactgctcagtcccgctctcctaccacacccacctttcccggcccaagccagcgcaccccgctgactccctgcccagtccaaactccaaggctgggcaaggcactgatccactgctggacaracccggggcagcctctgggtgaacagcagcgtgtccgccggcagcgaaccgagaccagcgagccgaccatgcggctgcacagacttcgtgcgcggctgagcgcggtggcctgtgggcttctrctgcttcttgtccggggccagggtgaggctccctcggaggggcgacagggaccgggctcagatctgccaaatgctgcggaggcagaacctgacagtgcgggagggcaggcgcctgggaggtaggagctggtggagatgacagcgtggaactcgtgagccccacgcaacgcctccccgccgcccaaggtgggctcctagaagcacagaaagggtcgggctgggggacaccacggcaaggaaccagcggagtacaggggccccaggagcgccgggacatgccaggccgggtaggcagcctggggtcggagtgggtgagggattggggtgtggggattcagtccatttccctcttatgattgtggctgtagcgggtgctgccggccggtaataacagtaatagcttctggcagcatctggctctcagtgtgtggcgtccttggccaggggggatgccctgagccctccaaaggggcctcagacaaggatagtggtccttggggaacagaagcccccaggcgccaaatcctaaagcagatctaagaggccacagtggctgggtgcgattggctcactcctttaatcccaccactttagaaggccaagggagagtatcgcttgtgcccaggagttggaggccagcctggacaacatagtgagactcggagtgtacaaaaaattgaaagaaattagtgggctgtggtggtctgtgacctgtagtcccagctacttgggaggctgaggtgggagatcactttagtaggggaggttgaggctgcagtgagccttcatcccactactgcactccagcctgggtgaaaaagcaaaaatctgtctccagaaacaagaaccaaagagctcgtggtgtccctcatgccatttacctcatcctgggcaagggcacaacttggcttccagggcaaaggtgaaggctctgtgtgcctgccaggcttctccaggcccttatcagaagctgggggagtgtttcggcctttggtcctctcacccgaaactctcctaagtgtatgatctgtctcttccaacccttccccaatttaatttgcgcaggtggagtccatactccccccgccccatggtgcactgctgcagggcttcctcccgtgcctgcccttgaccacattctagagttcaccaggagcccagcaggaagatctgcctggcctcacagatggctaccttttaaaatattttgggccaggcacagtggctcacacctgttatcccagcactttgagaggcagagatgggaggatcacttgaggctaggagttagagaccagcttgggcaacaagacttgtctctaccaaaaaaaaaaaaaaaaaaagtcaagcatggtggcagacagctgtactccaagctactcaggaggctgtggcgggaggatctcaagcccaggaggtggaggctgcagtgagctgttatcatattactgcattccagcctgggcaacagatggcgaccttgtctgacaaatatatatgtatacaaaattttgggttggacccacattcagaaaaaataattgacaagccataggagggtacaggtgatgtgtgccatcctctttttacccaaccagtcctggcttctcctcaggggccatcaaagtccccatggcccacactggaaactgcttgttgacaccgcagtacacacagtgcccagcagtttacacaagaatagatgtgtgcacttgtccttgattttcatctaaacagtcataaactcacccactttctggagccaggcttttctacagctgggactacaggcatgcaccaccacaccccgccaatttatttcctgatttttttgcagagacagagtcccactatggtccccaggccagtcactgtgctttttatatcccagccacagccatacttttctcttgcacctcttttcaccaacatcactcatggtttggatgatgctttctttacatgatttcttgccactttggacatgacatccctgaggacaagaaacttgcctgcccaattcccaccatcatcctactgtcacatgacctggcacacagttgaaggacactctagtcccatcaagggcatgtgaccctttgtttgaaggtcctagggctgaatgatgatgcctggccccaaggagcctcagcctggtgggatggagacaggcccaggaagccagagcgggaagggagtgttacaggcaggaagtttgtaaagcccatgtttacagatcagagtcccttgagctaagatgaggatggcaaggaagcagcaataccaacagttgggagggcagtcgattggtcaaacccaaccgtgatgtctgtctctctgcccacaggccaggactcagccagtcccatccggaccacacacacggggcaggtgctggggagtcttgtccatgtgaagggcgccaatgccggggtccaaaccttcctgggaattccatttgccaagccacctctaggtccgctgcgatttgcaccccctgagccccctgaatcttggagtggtgtgagggatggaaccacccatccggccatgtaagctctccaaggggtccagggaactccaggccctggggcaggggtgggggtgctctgagctcagctaggctgcagttatcatttcatctaaacccccacagccagttttccttctgagtttcgtggattcccacgtgcatttttccaatgagcatgctgaggctcaggagggcagaataacttctcagactcctggatcagggcttggcattcagaagacattggmtccaggtgccgaagggaggggcagacacacgtatctccccagattctggttatgccaagctttctctgccaccagtggcaggtgtctctgggaaaggttcgggttggctctatgaaccttgtaggagcccctaactctagtggcagatgttgcaaatacctgaagagaacagtagtggtagctttctggggacctgcactctccacaggcactgtgtccactgacaggaccaggagccattggccaagagacatgtatatgtatatgtatatgtttccaactggaggccatgtaggaatgatgagtttttgagagtttagacttgggatgagagacatcccactgcccttctcatgagaaattaacatccattcactcatgtagcacacatatgtgggctactcccctgtcccaggccttacgggttacaggaatatagtggtgaatgtcaacacatgcagccaatggttctcatagaaacccctaagagtcaaggtttccggcagtgcgaggaatgatacccaaggtcctcagtaacctcgaggcctccctggaagtccaagctgcatcccagcttccccagagcctgtggccygtaacttggtgggaagggatttttgagagggatcatgtgtgagcaggatattgtgggaagggtctgagggtggctgggagcacctctgaacccagggtctggttttggccacagcctggcccctggactgattatttgccctggttaccaggtgtctacaggacctcaccgcagtggagtcagagtttcttagccagttcaacatgaccttcccttccgactccatgtctgaggactgcctgtacctcagcatctacacgccggcccatagccatgaaggctctaacctgccggtgggtgtcaggccacagttcactgggggttggaggacagttcttctgcaagaagctgaaaaggacaatattagctcaggccctgcttcagagtggaccaygctgagaagcttctcactrtcaggtccaagaaatgctccttacccagactgggcagctggcccctggacatggggtcacagagttctggctgctcccagaggtcaaaggctgtggctctgggctggacccaggactcactcagccaactcatgccaggagatccacttaagtgccaaagggctgcaccttgaggtgaccaagaaccccagccatggataatctgttgggcctatagaatgggcacacacaaaaactttttttcttagagatggcatcatgctctgttgcccaggctaaaatgcagtggcatgaacatacctctctgtaacctcgaaatccgggatgatcctctcagattagcctcccgagtagctgggactactggcctattccaccatgcctggctcatttttaaaacattttctgttgaaacggggtctcactatgtggttcaggctaaggacatttttggttaatgttcatgtggagccatcagggagacaccccttttctttccactttggtgaattatctggggttaatgaacccaggctttgatacagggggttcgattgcaaagattgggaggcctggtcttcctgatagatcttgggtgcctaaccatttgcccatgtaatgaatttgtgctggagatctaatggggaggtagacagaggcaaagcactggttggtctaggtagtggccctggtggggtttgggctgggtgggagcatcatggtagctgccttgatttccccaggtgatggtgtggatccacggtggtgcgcttgtttttggcatggcttccttgtatgatggttccatgctggctgccttggagaacgtggtggtggtcatcatccagtaccgcctgggtgtcctgggcttcttcaggtgagactagggctgggctgggcaacccgggctgagcggggccaggacagccctgtgatccctgtccctgctacttctcagcactggagacaagcacgcaaccggcaactggggctacctggaccaagtggctgcactacgctgggtccagcagaatatcgcccactttggaggcaaccctgaccgtgtcaccatttttggcgagtctgcgggtggcacgagtgtgtcttcgcttgttgtgtcccccatatcccaaggactcttccacggagccatcatggagagtggcgtggccctcctgcccggcctcattgccagctcagctgatgtcatctccacggtgagtgccctcagctgaagaggcctaggcctgctccctcccctcatatccctcagagcctctgtctgttaaacggggatgacaagggccatcgggagcatgctccaggagctgctgcctaccgtggaattgctggggggctccagggtcagaattcacatccttctgccattgcagaggccgagcttgttctgtggctcctgtgcaaagttgtcaccctagggatccccaccatgaggagaatcatctaggcggatgggatggcccctgtgtctgggacttctgagttggaacagtgtcagaactgcaggaactcatacgaagtaccctctgagatttggggtacccctgttcttggccagggccttgggcaaactcctctcctctacctggaaggatgagccagcccctgcctggtccctttacaggtggtggccaacctgtctgcctgtgaccaagttgactctgaggccctggtgggctgcctgcggggcaagagtaaagaggagattcttgcaattaacaaggttggtctaaatggatgtgggtgtagaggaaggggtgcaataggcatggggctggcaggcctgcacggccgtcatattccctgggcacattacctcatctgcatgcctgagtgtcatagccctgggtcgggactgaaggtcggtgcatgctgagccaaacagtaatctcctggggtgggtatgagcatccagggataaactgggaaggagtggaaggtactcagagggcatcggaagatgtctgggacctgaccttgttccctgaccttacatttcccctcagcctttcaagatgatccccggagtggtggatggggtcttcctgcccaggcacccccaggagctgctggcctctgcygactttcagcctgtccctagcattgttggtgtcaacaacaatgaattcggctggctcatccccaaggtgagccccaacccaagcccacaagtgcctggggagcccatctggtagtggggggtgttcagggcttcatagctccaggctcatcccatccccagctacagactctctcctggccatccaggtcatgaggatctatgatacccagaaggaaatggacagagaggcctcccaggctgctctgcagaaaatgttaacgctgctggtaaggctcctggggtccctcgccaatggagacgggctcctctcctgtcctgagacagaggaaattcaacccccagatacccttcctatgtagtgacccccatgagcaaaggcctgggtgtgtgtgtttaggggtggggtcacctcagagcctygcctttgctcccccttcctgtgccatccccaagcccgagaccacctcctccctgcccctggcatccagtctaacctgcctcttcctgatccacctggggtagatgttgcctcctacatttggtgacctgctgagggaggagtacattggggacaatggggatccccagaccctccaagcgcagttccaggagatgatggcggactccatgtttgtgatccctgcactccaagtagcacattttcagtgtgagtatatttggaccaaagcctggcgggcagggtacagctcagggctgtgggtcccaggtgagacctgctgctgtccgggtcagcactcatgtttattgggctccggggacacttgacatccatcattgcagtaaatcctcatggctagcccaagaatccgacatttcccccatttcacagacgagcaaattgaagttagggaccttcagtgacttgcccaagatgacacagcaaagaatcgcaagtcctttcctctattcctgccccagcctggggctccacaccccattgtccagattccagccagctttggacctaggtatcttatcaccatgggtgaggcaagaagtcttcagggggaggggccaccrtgtcatgggctgtccaccccacaggttcccgggcccctgtgtacttctacgagttccagcatcagcccagctggctcaagaacatcaggccaccgcacatgaaggcagaccatggtgatgagcttccttttgttttcagaagtttctttgggggcaactacagtgagtcttcttcctttcccgggaggtgggctgggattctggctgggtctctgagcgatgattgattgtcctcactgcccagataaggaaactgaggctcagagagaggatgagatcaggtgtccaaggttttatagctccaaaagctgcaccaggattagaattcacgactcttcagactgtgagctgtgctccctctgcctctccccagccatgggtgtctggcctggtgcagaacaggtgtttcagggacatgtttatttcttcagtgactcccagagatagaaggaagaaggggcctttggggccatgaaggagcccaggatggagtcagccagagcctggtctacagggaaagtttggaaaaggggagggctggcttctgagggcagtggaagaaaaagcrgagaagcaggactggggacyraggtctcgggggccaaggacgagctccacctgggatgctgaggttggacatcctgatgaagacacatgtcctcttcctcttggcagttaaattcactgaggaagaggagcagctaagcaggaagatgatgaagtactgggccaactttgcgagaaatgggtgagacagcacacccctgcctcaacctccccgattgggggacttgtgcccatccagtgctctcctagtctggggtgacctcatgagcacacccgcatccttcatcacatgatggccccttccccagctccgggacccactcagacagggtgggggtgcrtggggcagtggacacgctctatctctccagtctacctggagggtgggcgccagtgctgtgccaccgtcagggcctccctctcagagagagggacacaacagagctggctgccctcccccaacccccactggtgctgacactagccagagggagcttatttcctgtttctggaagcctccccactcattccccaagcccacctggcctgcttggctgccttgcctgaccagactcagggtgctcaggtctgggcttcgggggcccagagtgaccctcatactgccctgctgggatggcatgtctacaggaaccccaatggcgagggtctgccacactggccgctgttcgaccaggaggagcaatacctgcagctgaacctacagcctgcggtgggccgggctctgaaggcccacaggctccagttctggaagaaggcgctgccccaaaagatccaggagctcgaggagcctgaagagagacacacagagctgtagctccctgtgccggggaggagggggtgggttcgctgacaggcgagggtcagcctgctgtgcccacacacrcccactaaggagaaagaagttgattccttcattcacttcgccattcattcatacttccgtccatccattcagaaagcatttattaagaatttactcaggcatgatggcccatacttgtaatcccagctattgggaaggatgagatgggaggatggcttgaggccagaggtttgagaccgaccagccagggcaacacagtgagaccccttctcaaaaaaaaaaaaaaaaaagagagagtgtgtgattagaagctaaataggaaagttttgagcttcaagtcagtgaggagtaaaaaagatttttaaaaagcaaaraaaamaaaatataagggaaaaatatgagaaaaataaaaataaaaagagaataataggccaggcactgtggctcatgcccctaatcccagcacttttgggaggtcaaggtgagcagaacacctgaggacaggagtttgagaccagcctgcccaacgtggtgaaaccccatctctatgaaaaatacaaaaatcagacgggcacagtggtggtgcccacctgtgatcccagctactcaggaggctgaggcaggagaattacttgaacctgggaggcagaggttgcagtgagctgagattgtgccactgtactccagcctgggcaacaagagcgagactccgtttccaaaaaaataagagagaatagaagaagctactgcatgatgttagttaccaagcctgccatgggtcctctcttgctagacacactccatagatccccccactgagctgtggatgggcaaaccccggtggaatcccaccctccccaacaccccactgagccctgggccccctcctcccttcctcacctccaccttctccctgccttctctcttctctcgtctgagcccccaggccttttccactttgagggaggtgcttcgaagaatgttgcccacacctaagtgttagaagcctatgtccgttcatccctgagaggtctgaaagaataaaaataaattctaaaaaaagcctctgtctgcctctccccaagccccaagtgctcttacatctgtgagtggccaggccgggtgcggtggctcacacctgtaatcccagcattttgggaggccaaggtaggcggatcaccacatcaggagatcgagaccatcctggctagcatggtgaaactccgtctctactaaaagtacaaaaaattagcctggtgcagtggcacacgcctgtagtcccagctactagggaggctgaggcaggagaatcccttgaacccgggaggcagaggttgcagtgagatgagattgcaccacggcactcctgcctgggccacaggacgagactcagtctcaaacaaacaaacaaagaaacaaaaacaaaaaacaaaaaaaatctgtgagtggccaataggaaacctggttactggaattcctagtgttttagtccattcagttgctatagcaaaaatactaccgattagacccggtgcagtggcccacacccatcatcacaacactttgggaggccgaggtgggtggatcacttgaccccaggagtttgagaccagcctggccaacatggtgaaacgctgtctctactaaaaagacaaaaattagccaggctctgtggtgcacacctagaatatcagctactcgggaggctgagacacgagtataacatgaacccaggaggtagaagttgcagtgagctgagattgcaccactgcactccagtctgggcgacagagaccctacctcaaaaataagtaaataaataaataaacaaataaataaatattaccggttaggccgggtgcagtggctcatgcctgtaatcccagcactattggaggccgaggtgggactcctgaacttgagcccaggagttccagaccagcctaggcagcatggagaaatgtcatctctacaaaaaaatagaaaaattatttggatgtggtggcacacacctatagtctcagttactcaggaggctgaggcgggcagatcacttgagcctgggaggtcagagctgcagtgagtcgtgattgcaccactacactccagcctgggcaacacagcaagaccctgcctcaaaaaaatagggcttccaatactgatataaaacttaaaatactacaggttaatattataaactgggtgccttataatgacagaaatgtattgcttacagttctcgaggcttggacatcgaggatcaaggtgccagcagatttggtgtctggcaaggacttgttctctggttaatagatggcaacctcaggccaggtgcggtggctcacacctgtaatcccagcactttgggaggccaaggtggggtatgacctgaggtcaggagttcaagaccagcctggccaacatagtgaaaccccatctctactaaaatacaaaaattagacgggtgtggtggcaggtgtctgtaatcccagctactcaggaggctaaggtaagagaatcacttgaacctgggaggcagaggttgcagtgagctgagatcacagcactatactccagcctgggcgacagcacgagacattatctcaaaaataaaaaataaaacaagccacccacccaactatcgatgtcctgcagaggtgcctaaccccacttttgtcagaagccagaccgggcttgtccataggcccctgagcctgggcctcctgcacagtggccaggaaagccaagctgcttcctcagtcgcccgtctcctgaaggttgctcttcttctcagtggttctacagacactgtaaggcccatactcacaggatattagcacacctgctaagagattcctgtccgctggctaccaggggcctctccatccagggaaatgtcctctcacgtttcagaatttccctgccaacctttcaaccccctgagcatccccaaattcaccatgtgtgtccacacgattacttttcctacttacctcattgttgtccctagacttttctccttccccgctctgcaaaaaacctcatattttatctcagtgtgcaaaggtggccaattgtgttcaatcggcctcttggtttcaccaaagtatattctctctgtcattaagaggctatatttctgtcccataaaccctaataatccccttatgcccctactgctgatcaacttgcctctcagggcacccgttttccatggggaaagtctcccttctttccagccagggcccgtaagtccaattacagagccttttgaagtttggggtgaaagaccaggacacccacattgcccattttggccaccaggtggcagacaaggataatattaagcctggaatgacttgaacttgagagagggaggagactttcctttcaatgaacactgattggtgcataatgttcccactacattctgaaagcgtttattgtgcaccagctgcatgcatgcctctgtatgtttttcagttctgcagatgtacaatataccttcccaaagtcagttcccaggattactgtttagacttaatagttctttttttaacagctttattgtgaaataacttacaatttaccccctgctcccccttttttttttgagacaaggtctagtcctgtcacccaggctagaatgcagtagtgcaatcacagatcactgcagcctccacctccgggcttcagacactgtaaggcccatagttacaggaccatagtacactcccgttcccagaccagttggtcgcctctggcctggcagggctcccagtgtctcgggacctccaggtgacgcgcctgcctcccctgctgcaacagaggcctgggagtgccgggtccccatcgctcggagcggcaggcgctcgtgaaatgttcgtcaagaggataaatgaccatggccctggtctccgcgggaggtgaggaaactgaaagccaccgaggaaaaggggggcgctccttaagaagtgccgcggtcacgtgtacgtttcaaaagaatggcgtgactgagtagggaggggaccgcggagaccctcagaccctggactgtaaggagatgaggggccgtgaaggggaacccaggaaactgagtcctgaaagcaaggaggagcttccagaatgaagggcgccgtcacgcctccctgcctttgctcaagcggttccttcaccccgatcaagttccttcccatttctccaactgtggggatcctgaacgtgcacctcctcagagaagccctcttgggatctccaattctagtttattgccccctcctatcgatcccccagcgcgctcatcgggcctgtggacaacgacaggtttgaggagaggattctctggatcgcggaggactacagaagccgcgcagccccttctgaggatgccaaaggggcccgggcagaagggaagtggccgtgcccgggcctgcctaccactagatccccacccacctatgactgttcagtcctgctctcctaccaacccacctttcccggcccaagtcagcgcaccccgccgactccctgcccagtccaaactccgaggctgggcaaggcactggatccacggctggaccgacccggggcagcctctgggtgaacagcagcgtgtccgtcggcagagaaccgagaccagcgagccgaccatgcggctgcacagacttcacgcgcggccgagcgcggtggcctgtgggctcctgctgcttctcctccagggtcactatgaggctcccgcggaggggtgacagggaccgggctcagatctgccaaatgctgcggaggcagaacctgacagtgcgggagggcaggcgcctgggaggtaggagctggtggagatgacagcgtggaactcgtgagccccacgcaacgcctccctgccgcccagggtgggctcctagaagcacagaaatggtcgggctgcgggacaccacagcgaggaaccagcggagtacaggggccccaggagcgccgggacatgccaggccgggtagacagcctcgggtcggagtgagtgagggattggggtgtggggattcagtccatttccctcttaygattgtggctgtagcctgtgctgccggccggtaataacagtaatagcttctggcagcagctggctctcaatgtgtggcgtccttggccaagggggcgcgctgagccctccaaaggggcctcagacaaggttagtggtccttggggaacagaagcccccaggctccaaatcctaaagcagatctaagaggccgcagtggctgggtgcgattggctcactcctttaatcccagcattttggaaggccaagggggagaatcgcttgatcccaggagttggaggccagcctgggcaacatagactcagagtgtacaaaataattaaaagaaattaatgggctgtggtggcctgtgacctctagtcccagcttcttgggaggctgaggtgggagatcactttagtaggggaggttgaggctgcagtgagccttcatcacactattgcactccagcctgggtgaaaaaacaaaaatctgtctccagaaacaagagccaaagagctcgtggtgtccctcacgccatttacctcatcctgggcaagggcacaacttggcttccagggcaaaggtgaaggctctgtgtgcctgccaggcttctccaggcccttttcgaagctccgggagtgttttggcctttggtcctctcacctgaaactctcctaagtgtatgatctgactgcctctcccgaccctttcccaatttaatctgcccaggtggagtccatattcgccccatggtgcactcctgcagggcttcctcccatgcctgcccttgatcacattctagaattcaccaggagcccagcaggaagatctgcctggcctcacagatggctaccttttgaaatattttgggccagacacagtggctcacacctgttatcccagcactgtgtgaggcagagatgggaggatcacatgaggctaggagttagagaccagcttgggcaacaagacttgtctctmccaaaaaaaaaaaaaaaaaaaaaaaaaggactctcaggcatggtggcacacaactgtgttcccaagtacttgggaagttgagatggggggatctcaagcccaggaggtgggggctgcagtgagctgcaatcacaccactgcactccagcctgggcaacagacggagtccaatatttagatgtatattatattatattataaacatatgtgtgtctgacaaatatattatatattttggtagagacaggctttcaccatgttggctaggctggtctcgaactcctaacctcaagtgatccacccacctcggcctcccaaagtgctaggattaccaaagtcacccactgcgactgacctgttttctgactttttattatgaaactgggctcagatttcccaaatcctacagaagcagaacctgaggttccaaaagggaaagtgccaggcaggtgggagctggtgggaataagaacagcaggtgaacctccctgaggcacagagagggtcaagcctgctcaagggctgcacagcaccaaaggatgagccaagtctgaggtagaaacagtagtataagaaatccaacatacccattgtccgtcttcagcaataacaaagatcttgtttttgtttctgttttaaatcagctttctcaggttgaatataacctggtgttttccggatggccacctctctcttgcatcattatttgaaacaaatcccagacatcatatcatctgtaaagttttcatcatgtcctactaaagaaaaggaacatatatatgtatgtgtgtatttccacaacataatatgttctcaatttaatcaaatatatggtcgtgttctttagtatttataaatgatacttgtattaatacaagtttttttttaaatcaggattcaaatamcgttcatactttgcaaataagtagatatttcttttttmkcwtytttttttttttttgagatkgagtctcactctgttgcccaggctcactgcaacctctgcctcttgggttcaagggatcctcatgcctcagctcccaagtagctagaattacaggcacatgccaccacgcctggctaagttttgtatttttagtagagatagggtttcaccatgtcagccaggctggtttcaaactcctgacctcaggtgatccacccaccttgacttcttaaagtgcttggattacaggcgtgagcctccatgccccaccaattgtcttggctttatagttaggagtggaattgctgagtcatatggcaactccatgtttaatcccctgaaaaactgccagactgttttccaaagcagctgcaccattttcctttcccctggcaatgtatgaaagttccaagttttccatatccttaccaacacttattattatctgtcatttttatgtgtttcttgaatctctttcagtcttcagatttaccatctgcctctctttaattttctttctaaattttgttgcatgtggaagaaaccagtttatttgttctggagaggatcccaccatttaggttttgctgattgcatccgggtggtgtcttttaacagttcttctatcccctgtctactgtgtaaacttgtatttatattctagaggcataatcagatttgggttttaggttttattttgttttgttttttggaggaccacttcacatgtggtgctgcatacttctgatagaaaatatgtaacgtctgattatcttgcttgttgggataccacaaaatgagtggttgacatcacagtgagaattcaatgtgcatttctcttactatgaatgacttaaagatctcttcgtttatttgagagacactgatttgtagtgcttattctgaacacattcttatgctactttttctgttgtatacatgacatattctttgtttgtagaaattctttatcgattaagaggactgattttctctgttaggcaattttccatcacttcctccctccctgatccccacagcagtcacactatgttttttctggagactgggtcttgctttgttgcctagactagagtgcaaaggcgggatcatagctcatgcagcgtcgaattccttctgccttagcctcctgagtagctgagtagctggcccagagtttgagaccagcctagccaacacggtgaacccctgtctctactaaaaatacaaaaattagctaggcttggtggtgcacacctataatcctacatattcaggaggctgagacacaagaatcacttgaactcaggaagcggaggttgcagtgagccaagatcgcactactgcactccagtctgggtgacagagcgagggtctgtctcaaaaaaaaaaataaataaatactaccggtttcggccaggcacggtggctcatgcccataatccccgcacttttggatgccgaggtgggcctcctgaacttgagcccaggactttgacgctagcctaggcagcttggagaaacgccatctctacaaaaaaaaaattcaaaaattggctggatgtggtggcacgcacctgtagtctcagttactcagtaggctgaggcgggcagatcacttgagcctgggaggtcagagctgcagtgagtcgtgattgtgccactacactccagcctgggcaatacagcaagaccctgtctcaaaaaaaaaagtttcctatactgatataaaacttaaaaaaaaattttacagattgatgttataaactgggtgccttcatgtgacagaaatgtattgcttacagttatagaggcttagaagtccaggatcaaggtgtcagcagatttgctgtctggcaaggacttgttctctggttaatagatggcagcctctcattgtgtgctcccctggaggaaagggaaaacaagctccatctggcctcttttgtaaggacactaatccccttcacctcctgaagtcccyacctcttgacaccatcacattggggattaggtttcaccatacaaatttttgaggcaatacaaacatttaaaccatagcacttagagctcccagatttcagccaccaaggtcaccaactactgaaaatgtaaaagttcctatactccccttttgtcccactaaatgtcgtctatcattgacatttaaaacaagccacctttacaggccaggtgcggtggttcatgcctgtaatcctagcactttgggaggccaagccaggtggatcacctgaggtcaggatttcgagaccagcctggccaacaaggtgaaaccctgtctttactaaacacaaaaattagccaagcgtggtggcacatccctgtaatcccagctacttgggaggctgagccaggagaattgcttgaaccctggaggcggagatcatagtaagctgagattgtgccactatactccagcctgggtgacagagcaagactcaatctaaaaacaaaaacaaaaacaaacaaacaaaaacaagccacctcctcgcctatctgtgtcctgcagaggtgactcaacccatttttgtaagaagcaagactgggcttgtccacaggcccctgagcctgggcctcctgtacagttgccaggaaagccaagccgattcctcagtggccgtctcctgaaggttgctcttcttctcagtggttctacagacactgtaaggcccctactcacaggatcgtagcacactcgcgaagatgtttacctgtggggtgtgccccggaagtgggattgagggtccaaaggtccaggcatatctaagaaaagagattcctgttccctggctcccaggagcctctccacccagggagatgttctctggcctttcagaattcccttgccaacctttcagccccctgagcatccccgaactcaccatgtgtgtccatatgattattttcctacttacctcattgttgtccctaaacttttctccttcctggcttcgcaaaaatcctcctcatattttatctcagtgtgcaaaggtggccaattgtgttcaatcggcctcttggtttcaccaaagtatattccctctgtcattaagaggctgtattctagtcccatagaccctaataatccccttatacccctacctctgaccaacttgcctctcggggcaccggatttccagggcgaaagtctcccttctttccatccacggcctttaagcccaactacagctttttgaagtttggagcgaaagaccaggacacccactttgcccatttgggccaccaggtggcagacaaggataatgttaaacctgggctgacttgaacttgagagagcagggagactttcctttcaataaacactggtgcataatgtttccactacattctgaaagcatttattgaacaccggctgcatgcctgtctctgtatgtttttcagttctgcagaggtacaatatagtttcccaatatacattcccaggattactgtttagacttaatagttattttttaacagctttatagtgaaataacttacaattaaatttacctccccccaccctttttttttttttttttctgaggcaaggtctcgttctgtcacctaggctggaatgcagtggcacaatcacagctcactgcagcgtccacctcctgggctcaagccatcccccacctcagcctcccaagtagccaggaccacaggcacatgccaccatggctggagaacttaaatttttttattttttatttttggtagaggcgaagtctcactaggttacccagctggtctccaactcctaggatcaagtgatctttccatctaggcctcccaaattggtaggattacaggcagatgtgaaccactgtgcttggcctaaactcacccattttcagtgtgcagtttgatcacgttgagtaaatgtataagacatgcaaacaccaccacgtggagttttacaatatttctatcactccaaaattccctcaagcccttttgcagtcaatcgtcctgatccatgctcctaagcaaccatcgagttgctttctgttgctatagtttgcattttctagaatatgaatgaaataatacaaattataaattaatatgatagtactaattatataaatgaaataacttgcgattggcttctgtcaattgtgtttttgaaattcaaccagtagttcttttcttttatcgtggagtggtattccatgtataaatatactccctttctttttctttagagacaggatcttgctatgttgctcaggctggtcttgaactcctgggcttaaacaatcctcccgcctcggcctcccaaagtgccgggattatagaagtgagccggtgtgcctcgccaatatacgcaactttattaattcatcagtgtaggggtggcctgcccctccacacctgtgggtatatttcatcaggtgggatgagagactgagaaaagaaataagacacagagacaaagtatagagaaagaaaagtgggcccaggagactggcgctcagcatatggaggacctgcaccggcaccggtctctgagttccctcactttttattgattattattttcaccatctcagcaagaggaatgcggcagaagagcagggtgatagtggggagaaggtcagcaagaaaacatgtgagcaaaagaatctgtgtcataattaagttcgaggggaggtagtatgcctggatgtgcacgtaggccagatttatgtttctctctgcccaaacatctcagtggagtaaaacataacaaagcagcattgctgccaacatgtcttgcctcccgccacagggcgttttttttcctatctcagaattgagcaaatgtacaatcgggttttataccgagacattccgttcccaggggcaggcaggagacagaggccttcctcttatctcaactgcaagaggccttcctctttkactaatcctcctcagcacagaccccttatgggtgtcgggctgggggacggtcaggactttctcatcccaagaggccatatttcagactatcacaggcggggagaaaccttggacaatacccggctttccaaggcagaggtcccagcagcttttcgcagtgcgttgtgcccctggtttattgagactagagaatggtgatgacttttaccaagcatactgcttgtaaacattttgttaacaaggcacgtcctgcacagccctagatcccttaaaccttgattccatacaacacatgtttttgtgagctcaaggttggggcaaagaggttggggcaaattggctggggcaaagttacagattaacagcatctcagggcaaagcaattgttcagggtacaggtcaaaatgaaatttcttatatcttccctttctacacagacacagtaacagtctgatctctctttcttttccctacaatcagtgggtgcacatttgagtgacttccatttttggggtatttttataaagctgctgtgaacattttcagacaaacctttcatttctttggggtagatagctgagattggacactcaccatataatgccattctgggtcatatggcaagggtgtgtttcacttttaaagaaaacgccccctatttaaagatctacactaggctgggcgcagtggctcacgcctgtaatcctagcactttgggaggccgaggcagatggatcacctgaagtcaggagtttgagaccagcctggccaacatggtaaaaccccgtctctactaaaaatacaaagattagccgggcatggtggcgcatgcctgtaatcccagcttcttcagaggctgaggcacaggaattgcttgaacctaggaggcacaggttgcaatgagctgagattgcaccactgcactccaacctgggcgacagagcaagactctcaaaatacataaataaataaatatctacactacacgacaaatacatagattttgtgtgtgtgtgtgacggagtcttgctctgtcacctaggctgattttttaaaaaaaataaaatgccaaactgttttccaaaatgactatatgatttttgcaaccctaccagccatctgtgagggttccagatgctttctatcttcactaaaacttggtcttatgggccttaaatctgattttttcaggtttttgttttcgtttttatagagtcagggtctctctgtcagcaaggctagggtgcagtggcatgatcatagctcgctgtaaacttgaactcccgggctcaaggaatcctcccacttcagcctcctgagtagctagcaaaacaggcatttttaaaaattctgtagccaggcgtggtggttcatgcctgtaatcccagcactttgggaggctgaggcaggcagatcacgaggtcaagagatcaagaccatcctggccaacatggtgaaaccctgtctctactaaaaatacaaaaattagctgggcgtggtggtgtgcacctgtagtcccagctactctggaggctgaggcaggagaattgcttgaacccacgaggtggaggttgcagtgagctgagattgcacaactgcactccagcctggcaacagagcgagactctgactcaaaaaaaaaaaaaaaaaaaaagaaaagaaaaaaaactgtagagatgggatctcattatgttgcccaggctaatctcaaaatcctgggctcaagctatcctcttgtctgagcctcccaaattgctaggattacaggtgtgagccatcacacctgaccctgatttttttaaatgcatgtttagtggcacctcattgcaattggttccttggacttttagcctctgcttttgactatctctctctctgtgtctctatctctctatatttactatatatgtaacatttcctcacacacagagaaatgtgctcccgagatgactcttcttttcctttcacttctttttcttgagacagagtctccctttattacccaggctgcagtgcagtggcacgatcatagctcactgcagccttgacttcctgggctcaggcaatcctcccacctcagcctcctaagtagctgcaactaaaggcgtgcaacaccagcctagcgaattaaaaaaaaaaaaaaatctgtagagatagggtctcactatgttacccaggctggtctcgaactcctgagctcaagtgatccttctgcctcagcctcccaaagtgctgggattacaggtgtgagccaccatgcctgcccttcatttcacatttttatgattccctcagtcatcatcgatgccaagacctctgaaccatagcacagtaaatggtggaatccatgggcatgttccccccagtagtcatggacagcagcccagggatttggaagaagttgacctgttaatgtaaaggagctttgtcactggactctgagctgggaggagctggggacctcttagcacccacaacccaggtattaattaggacatgagaattaagggcagagttagcatctaccaaggcaggaggctgggaggatggctggggccacagtgagttggatgggagacattgaatcaacaacaggccatgctgttgggtggaggtcgagagcaacttctggtggagactggaaggagagaaactggagacagcaaaggtggatgactagctttcctagaaataagaacagaagggccaggcatggtggctcacgcctgtaatcctggcactttgggaggtggagggaggaggatttcttgagcccaggagttcgagaccagcctggtcaacatagggagatcccatctctacaaaaaacatacaaaaagtaaaaaaataaccaggcatgatggcacacatgcacctgtagtcgcagctacttgggaggccaaggtgggaggatcacttaaacccaggagattgaggctgcagtgagccaagatcatgccactatactctaccctgggtgacagagtgagaccctgtctccaaaaaaacaaaaaagaagaggaagaaagaaagagaggaaggaaggaaggaagtgggggggagggaaagaaagcaagaaagaaagaaagaagaaagagaaagaaaagaaagagagacaaagaaaagagaggaaataaaaagaaagaaagaaagaaaagaaagaaaaagaaagagagaaagaaagaaagagaaagaaagaggaaggaaggaaggaaggggaaaaacagaagaatggagcaatagctagagggcaaagtgggtcaaggcaggctttgatggtggcatttacacagaagctgtgtttgcagctgatgggagggatgctgctaccaaagagacagccctggggacgtgggaggggaccagggtctagtgtccatgggtaggtcccagagctgggactagagcaagacaagcaagtgtaaaatttagaaggcattcattctcaggtgccgaccctctactggtatgaccccgggggtgagtgactctttaacttttatgccctgggcgccttgctggcctgtctcacc

SEQ ID NO: 95443 - DNA, 14845 bp, Homo sapiens
tttgcacaggagccacagaacaagctcggcctctgcaatggcagaaggatgtgaattctgaccctggagccccccagcaattccacggtaggcagcagctcctggagcatgctcccgatggcccttgtcatccccgtttaacagacagaggctctgagggatatgaggggagggagcaggcctaggcctcttcagctgagggcactcaccgtggagatgacatcagctgagctggcaatgaggccgggcaggagggccacgccactctccatgatggctccgtggaagagtccttgggatatgggggacacaacaagcgaagacacactcgtgccacccgcagactcgccaaaaatggtgacacggtcagggttgcctccaaagtgggcgatattctgctggacccagcgtagtgcagccacttggtccaggtagccccagttgccggttgcgtgcttgtctccagtgctgagaagtagcagggacagggatcacagggctgtcctggccccgctcagcccgggttgcccagcccagccctagtctcacctgaagaagcccaggacacccaggcggtactggatgatgaccaccaccacgttctccaaggcagccagcatggaaccatcatacaaggaagccatgccaaaaacaagcgcaccaccgtggatccacaccatcacctggggaaatcaaggcagctaccatgatgctcccacccagcccaaaccccaccagggccactacctagaccaaccagtgctttgcctctgtctacctccccattagatctccagcacaaattcattacatgggcaaatggttaggcacccaagatctatcaggaagaccaggcctcccaatctttgcaatcgaaccccctgtatcaaagcctgggttcattaaccccagataattcaccaaagtggaaagaaaaggggtgtctccctgatggctccacatgaacattaaccaaaaatgtccttagcctgaaccacatagtgagaccccgtttcaacagaaaatgttttaaaaatgagccaggcatggtggaataggccagtagtcccagctactcgggaggctaatctgagaggatcatcccggatttcgaggttacagagaggtatgttcatgccactgcattttagcctgggcaacagagcatgatgccatctctaagaaaaaaagtttttgtgtgtgcccattctataggcccaacagattatccatggctggggttcttggtcacctcaaggtgcagccctttggcacttaagtggatctcctggcatgagttggctgagtgagtcctgggtccagcccagagccacagcctttgacctctgggagcagccagaactctgtgaccccatgtccaggggccagctgcccagtctgggtaaggagcatttcttggacctgacagtgagaagcttctcagcatggtccactctgaagcagggcctgagctaatattgtccttttcagcttcttgcagaagaactgtcctccaacccccagtgaactgtggcctgacacccaccggcaggttagagccttcatggctatgggccggcgtgtagatgctgaggtacaggcagtcctcagacatggagtcggaagggaaggtcatgttgaactggctaagaaactctgactccactgcggtgaggtcctgtagacacctggtaaccagggcaaataatcagtccaggggccaggctgtggccaaaaccagaccctgggttcagaggtgctcccagccaccctcagacccttcccacaatatcctgctcacacatgatccctctcaaaaatcccttcccaccaagttacaggccacaggctctggggaagctgggatgcagcttggacttccagggaggcctcgaggttactgaggaccttgggtatcattcctcgcactgccggaaaccttgactcttaggggtttctatgagaaccattggctgcatgtgttgacattcaccactatattcctgtaacccgtaaggcctgggacaggggagtagcccacatatgtgtgctacatgagtgaatggatgttaatttctcatgagaagggcagtgggatgtctctcatcccaagtctaaactctcaaaaactcatcattcctacatggcctccagttggaaacatatacatatacatatacatgtctcttggccaatggctcctggtcctgtcagtggacacagtgcctgtggagagtgcaggtccccagaaagctaccactactgttctcttcaggtatttgcaacatctgccactagagttaggggctcctacaaggttcatagagccaacccgaacctttcccagagacacctgccactggtggcagagaaagcttggcataaccagaatctggggagatacgtgtgtctgcccctcccttcggcacctggagccaatgtcttctgaatgccaagccctgatccaggagtctgagaagttattctgccctcctgagcctcagcatgctcattggaaaaatgcacgtgggaatccacgaaactcagaaggaaaactggctgtgggggtttagatgaaatgataactgcagcctagctgagctcagagcacccccacccctgccccagggcctggagttccctggaccccttggagagcttacatggccggatgggtggttccatccctcacaccactccaagattcagggggctcagggggtgcaaatcgcagcggacctagaggtggcttggcaaatggaattcccaggaaggtttggaccccggcattggcgcccttcacatggacaagactccccagcacctgccccgtgtgtgtggtccggatgggactggctgagtcctggcctgtgggcagagagacagacatcacggttgggtttgaccaatcgactgccctcccaactgttggtattgctgcttccttgccatcctcatcttagctcaagggactctgatctgtaaacatgggctttacaaacttcctgcctgtaacactcccttcccgctctggcttcctgggcctgtctccatcccaccaggctgaggctccttggggccaggcatcatcattcagccctaggaccttcaaacaaagggtcacatgcccttgatgggactagagtgtccttcaactgtgtgccaggtcatgtgacagtaggatgatggtgggaattgggcaggcaagtttcttgtcctcagggatgtcatgtccaaagtggcaagaaatcatgtaaagaaagcatcatccaaaccatgagtgatgttggtgaaaagaggtgcaagagaaaagtatggctgtggctgggatataaaaagcacagtgactggcctggggaccatagtgggactctgtctctgcaaaaaaatcaggaaataaattggcggggtgtggtggtgcatgcctgtagtcccagctgtagaaaagcctggctccagaaagtgggtgagtttatgactgtttagatgaaaatcaaggacaagtgcacacatctattcttgtgtaaactgctgggcactgtgtgtactgcggtgtcaacaagcagtttccagtgtgggccatggggactttgatggcccctgaggagaagccaggactggttgggtaaaaagaggatggcacacatcacctgtaccctcctatggcttgtcaattattttttctgaatgtgggtccaacccaaaattttgtatacatatatatttgtcagacaaggtcgccatctgttgcccaggctggaatgcagtaatatgataacagctcactgcagcctccacctcctgggcttgagatcctcccgccacagcctcctgagtagcttggagtacagctgtctgccaccatgcttgactttttttttttttttttttggtagagacaagtcttgttgcccaagctggtctctaactcctagcctcaagtgatcctcccatctctgcctctcaaagtgctgggataacaggtgtgagccactgtgcctggcccaaaatattttaaaaggtagccatctgtgaggccaggcagatcttcctgctgggctcctggtgaactctagaatgtggtcaagggcaggcacgggaggaagccctgcagcagtgcaccatggggcggggggagtatggactccacctgcgcaaattaaattggggaagggttggaagagacagatcatacacttaggagagtttcgggtgagaggaccaaaggccgaaacactcccccagcttctgataagggcctggagaagcctggcaggcacacagagccttcacctttgccctggaagccaagttgtgcccttgcccaggatgaggtaaatggcatgagggacaccacgagctctttggttcttgtttctggagacagatttttgctttttcacccaggctggagtgcagtagtgggatgaaggctcactgcagcctcaacctcccctactaaagtgatctcccacctcagcctcccaagtagctgggactacaggtcacagaccaccacagcccactaatttctttcaattttttgtacactccgagtctcactatgttgtccaggctggcctccaactcctgggcacaagcgatactctcccttggccttctaaagtggtgggattaaaggagtgagccaatcgcacccagccactgtggcctcttagatctgctttaggatttggcgcctgggggcttctgttccccaaggaccactatccttgtctgaggcccctttggagggctcagggcatcccccctggccaaggacgccacacactgagagccagatgctgccagaagctattactgttattaccggccggcagcacccgctacagccacaatcataagagggaaatggactgaatccccacaccccaatccctcacccactccgaccccaggctgcctacccggcctggcatgtcccggcgctcctggggcccctgtactccgctggttccttgccgtggtgtcccccagcccgaccctttctgtgcttctaggagcccaccttgggcggcggggaggcgttgcgtggggctcacgagttccacgctgtcatctccaccagctcctacctcccaggcgcctgccctcccgcactgtcaggttctgcctccgcagcatttggcagatctgagcccggtccctgtcgcccctccgagggagcctcaccctggccccggacaagaagcagcagaagcccacaggccaccgcgctcagccgcgcacgaagtctgtgcagccgcatggtcggctcgctggtctcggttcgctgccggcggacacgctgctgttcacccagaggctgccccgggtctgtccagcagtggatcagtgccttgcccagccttggagtttggactgggcagggagtcagcggggtgcgctggcttgggccgggaaaggtgggtgtggtaggagagcgggactgagcagtcataggtgggtggggatctagtggtaggcaggcccgggcacggccactttcctttgcccgggctcctttggcatcctcggaaggggctgtgccattcctgcagcccttccgcgatccagggaatcctctcttcaaacctgtccttgtccacaggcccgatgagcgcgctggggsatcgataggagggggcaataaactagaattggagaccccaggagggcttctctgaggatgtgcacgttcaggatcccccagatggagaaatgggaaggaacttgatcggggtgaaggaaccgcttgagcaaaggcaggaaggagtgtcggcgcccttcattctggaagttcctccttgctttcaggactcagtttcctgggttccccttcacggcccctcatctccttacagtccagggtctgagggtctccgcggtcccctccctactcagtcacgccattcttttgaaacgtacacgtgaccgcggcacttcttaaggagcgccccccttttcctcggtggctttcagtttcctcacctcccgcggagaccacggccatggtcatttatccacttgacaaacatttcacgagcccctgccggtccaagctgtggggacgccgtactcccgggcctatggtgcagcaggggaggcaggcgcgtcaccgggaggtcccgagacactaggatccctgccaggccagaggcgaccaaccgtcctggatacrggagctcccggccagcctgacttccaggaggaagcggtgtggggattacctccgaccgcctttagtgccccctgagacctggttctggcctctacgtttcagcccgctactggctcgcacgacccagcgccgccgtggtcccttctcagcgccttctgctccagcgaccatcatgttcccgggtccgagcagccagggccgcggtcaccgcttctctcgcacctcaggccgagaacccacaacgcggcgtgtccctcgcgcgactccgtcgccacgccacgcccccttcccgttctccggaagtgcgcgggttggagcggaagcgcacgcctgctaggatcagcggtggtggttccgcgatggtaggcggcggcggggtcggcggcggcctcctggagaatgccaaccccctcatctaccagcgctctggggagcggcctgtgacggcaggcgaggaggacgagcaggttcccgacagcatcgacgcacgcgagatcttcgatatccsccgctgctgggcgcgggcgggttccgggggcttgcggtggggggagcagtgatatcgagcagctggtggagccgcatcccagcagggcgttcctggcagagggttctaagtgggcaagggcgcagagtcccttttccttcacttcccacatctgattcgctccatcaatgacccggagcatccactgacgctagaggagttgaacgtagtagagcaggtgcgggttcaggtgagtcacttccgaggggagcgagttgttccagagagtcagaaaggtttctgtgcagcaggagctggcgtgctctatgctcacgaacaccgaagggtatctttggggagggagattgttgtgcctattttatgggtgttgaaactgaggcccatagaagttggatgatttgcccaaaacaacaaactaagaagagggaccttgggctgagggtggttgactcttgacatctctcctccacaaccaggttagcgaccccgagagtacagtggctgtggctttcacaccaaccattccgcactgcagcatggccacccttattggtctgtccatcaaggtcaarcttctgcgctcccttcctcagcgtttcaaggtcagttggagctgagccccgggagtgagaccaggcattgagggtctactgctgaggatggggactgggagagcatgaacatggataggacatcagagtggggcctggaaggatccccattagcagagaggaaactgggaggaagctttccaagtcgatgtgacaagaataaagatctgagctggaaagtggagaaaagtattgaagagtgtggcaggaagggcagtagggagcggcagatgggtttggaccaggggtggggcacaggcaggcctttaaatcaacagtagtgggccagttctttggatagaattggaatagctagggccgggcgcggtggctcacgcctgtaatcccagcactttgggaggctgaggcgggtggatcatctgaggttaggagttggagaccagcctggccaacatggtgaaayctcatctctactaaaaatacaaaaattagtggggcgtggtggtgtgtgcctgtggtcccagctacacgggtggctgaggaaggagaatcaaattgaacctgggagacagaggttgcagtgagccgagattgcgctgctgcactccagcctgggcaacagagcaagactcagtcttggaaaaaaaaaaagaattggaatacctgtggatgggtttggggtgtaacggaagggccagagtccaaaggcatgattaggaggaaggatcagctggagatggtgcctgarggtctgggggctgcagggaaaagtgtgggtcggtgggtgggtgttcaggccctggttatctccctcccagatggacgtgcacattactccggggacccatgcctcagagcatgcaggtaagtgtggactggtggtgagggtgttggcccgggcaccccctaagcagtctgaggcttcccccttgcacaggagtctatgggcaagactggagatgggtaactgtgtgagtgaaattgccagagactcctcagtatgggttatagcctagaccraagctggcctgagaagactctcctttgcttaccatgtcctcttctcccaaatcccctctcaccaaatatacaggaccagagtgtgtcaggcttcagcagcgcaggaggcagccagggggagggatcctaagaaggcagattaggtgggctcaggtggttgaagtagcctgatcaatatgtggggtcctgggaaggaggtgacaggagggctctgttgctgcgggggacatatcctatatagaggttcagaggtagggctggctagcactctggccagagcctagctttgactctgccttccccacacccttcttcccacctagtgaacaagcaacttgcagataaggagcgggtggcagctgccctggagaacacccacctcttggaggttgtgaatcagtgcctgtcagcccgctcctgagcctggcctttgacccctcagcctgcatactggtatcctggtcccagctcctgccagggctgttaccgttgttttcttgaatcactcacaatgagaaactaacattttgctttttgtaataaagttaatttatattcagttcccagcatgccttggtgtctttcatcttggtggagtcatttggagtttgagggggggatggtggtagtaagtgcctctaaagggtggtgtacttgcaacttttcgtaaaataaaatcaaaatggaaagagtagtgtacgaatgtgcctgtatgctcaccaccaccagtagagtcaacagttgttgacatattgcaacactggccatatttatgtgtgcatatataaatatcagtaagtaagctgcagagacttgactcttcactttgaagtactgcagctcctatagtcaatataagcctgtatagccacaatacttttatctgatcagaaaatgaacagttcctcaacaccatctaatacccaggcatatctggatttccctaatgtgtcatcatagttgtttttgttttgtttttgagacaaggtcttaccctgttgcccaggcccaggtgcagtggcaagattgtagctcactgcagcctccaactcctgggttcaagcaatcctccagccttggcctcccaagtagcttggattacaggcatacaccaccattcctggccaaatttttttttctttgaggggacacagtcttgctctgttgcccaggctggaatacagtggcacaattatacctttctgcagccttgacctcctgggctcaagcgatcctcccacttcagcctcccgaatagttgggactacaggcatgcaccaccgtgcctggctaatttttaattttcttgtagagacagggtctcctaggttgcccaggccggactctagctcctgggcttaagtgatcttcctgcctcatcctcccaaaatgttgggattacaggtatgagccaccccaaccagcccaatcaaaagaatatttatttatttatttatttatttatttttattttttatttttgggggtagagatgaggccttgccgtgttgcccagcctggtctcaaattcttgtcctcaagcagttctctcacctggtccgccaaagcactgggattacaggcttgagtatcacacctagctgtttttcagtttttttaattcaaaaaaacattttgttaagaggtagtgtattgctctgtcacccaggctggagtgcagtgatgtgatcagagctcactgtagcctcaacctcctaagcccaagtgatcctcttgcctcagtctcccgagtagctgggactacaggcgtgtgctaccatgccaggctaattttttaattttttgtagagactgggtctccctatgttgcctaagctggtcttaaactcccaggctcaagccccacaacctgctgggattacaggtgtgaacaccacgcccagccctttgtcttttttcacagtgattgtttggaaaagttcagagaagtcccagttctgcagtctgatttgttcctgatttgtgttgcctttaactggaaattggtctaaaggcctcagtgagtccaggtttgcgctttttgatgaaaaccctgcccaggagtggcatatatattttataagcccactagtaggtgtgtgatgccagcttttccagctgttagtgatggccgtctggtccctgataagggcagtgacatcagacttctctgttgaagggaacctgaggcaccctctcaatcagccctcccaaaggcatgtgtcacccccagtgttgagtaagagggaagctcagcactgtgaagtgacgtgctcgggtctaaggcctctgcctccccttggccctatgcccagattgcatttggtcacctggacagactgtagggcttagaccttggcttagctggttaggatcactttcccagggggagcatccttcctgctttagtctcattctctgaagataaatggcaatattaagaagcagtgcccaaccccacctcatccctactgaggcccagatatgattgtgggcagagaagcctcagtagggatcctggccattttgcagatctgttcttgagggcctgctgacagcattgagcctatcctaagagtggaattcagtcgagggctttacacttactatctagtcagttctccatccagccctatgcagcaattgctatcctctctctctcttttttttttttttttttgagacacagaatctcgctatgttgcccaggctggagtactgtggctatccgtaggtatgattatagcacactacagccttgaatgcctgggttccagggattctcttgcctcagcctcctgaattcttgggactgcaggcatgtgccatcacacctcgcttgctattctttatccccaattttcggacaggaaatgggcttctagaataaatgtagtcagacctccattatccatgcgttctacatccatgggtacaacccgctgtggatcgaaaatgtagttaggcctaggatgactgtgtctgtactggacatgtacaaactttttttcttgttgttattccctaaacaatgcagtctaacaacaacttacatagcatttacattgtattaggtattacagtagtaatccggagatgacttaaaatatatggaagaatgtgcagaggttaaatgcagatactgtgccattttatataagagacttgatctcagccactgaagttgagtttaaaaaacaaagtaaaaaaatatatgtaaaggagttaagtattcatggattttgggattcatggggatcctggagccaatcccctgtggataccaagggacaactctaatttacttctcaagacatctagccgggcacggtggctcacacttgtaatcccagcattttgggaggctgatgtgaggatcgcctgagcccagcattttgaggcaagcctgggcaacatagcaagaccctgtctctaaaataaaatgtgtgtgtgtatttagtggggaatggtggtgcatgcctgtggttccagctactcgggaggcggaggtgggaggatcgcttgagcccaggaggttgaggctgcagtgagctatgattgtgccactgcactccgtcctgggtgacagagcaacaccctgtctcaaaaaaaaaaaaaaacttacagctagggagtaaaggaggccctgagcagcttgataggtgctgtgcagctggcagggggcgccgttgcctacagaaggggctaagcccatcctgaaccccaactcctattgctcccactcagctcactcttaggagggagtggcctcgccacctaatgaccaagaggaggtgctggatctggctacctaagatcagagaggtgaagccatcagcccctattgcccagagcttcttcatctgtgagggggatagtcatggcaaccacttgggactgcccttgggagatttaaatgggtctaggcctagctctgatgatctaggcactgtatcccgcacagatgaggaagctgagggctccagagaggcagagtgaacagctgagccccagggagccttcccgagctgaaggcctcacaccctacgacgtgtgtaccttctgccggacagtccctgtctgaggtggccatggtgtctgtgttgagctggggatgaagggagtcatgggggcggcaggtgtgattgagtcatttggctggccttcctggcagccaggccatggtgggtgagggacaccaaactgctcatgccacagctgacatatcagatagttctcttgtcactcttgactcatcagtgcctggcccctggctgcctgcagggccaccatctgtgcatcctgggccagtgcccagggaactttctggaaccccagatgctatctgaggacacaagggtacaggggatggtgaagtttgaggttcctgaaaccctccaccaggtatgtctggctctgctgtttctggcctgtgactcctcaggctttggttaccatgtctacaaaatgggaacaacaaatcatagctgagtttgacccagggattagatgacatgtatgaacatgcccggccatgtctatttttgctcatcatcctgcccccagcacaagggcctggcacacagtaggtatttagtacaggaccgcggaatgaatgaatgcattgggccttagaacacagcagaggctctggggcctgaaggctgtggtgtgaggagggggtggggacactgaagcccagcccagttccctctgcagcatcttgtcacctgagggacggggaagagtgtggggtcctacagagaggagacatgggtatggggctaggggagaggtatctgcattgttcctgagacctctgccccactcctggacagaccaccatcctggagagagtggagcagaaacaggagagggaccacaaattcacctaacctgccccatccaacgaaggatgatcatgataaacgtgctcttagtgagatattactgtgtgcccgacttgagccaactactgtgcctctgcatttcatgtttgttttgtcttataataaccatcaggaagaggtgatccctgttctacactggagaaactgaggctcagcctagataaatggacacaggtgaaacagctagcaaggagcacagctgggatctgaagcccgggcggacctaggagtggttctagcctcagtttattcctcctgggcagccatgctcagcccagagagctgggagaaccaggtggtgggagtgggggtgtctcaaggttgtgtcctggtgttaatccctggggcccctggccatatctagcttgtggtgagtgtctctggcctgttggagcagccactggaatgcctggggcttgagtggccctttgtggttgcagttcccttggcaatgaagaaacactgctgaggtcaagagctcagattgccagaggggaaacccagccctccttctttgcatggccccctgctgggaagggccacagctaccccccaccctcgccctctgccagacacccagaggaggctctttccagtggcacagtcatggggttggagggggcacaggcagcccagccaggattcctcatgggaagtgtgtggtggctctttagacttgcctgctaacgggaggctctgcccataacttcctcttcccactggagttcgttcaggaagccagaaccagcatggggatgctcaggcctccaagatcccctaggaccatgggcaggccacccctcagcccagcttttgcctactttgaagacctcaaggacaagagggccctaatcttaccgagccaggccctcctcaatccaaggccttcttaggcgttgccaaggaaactgatgcagcagccaaagagcctggcccaggtctccatgacaacctaccacagcccaccagggtccatccatctgtgatgtcacctgagccccaaatggatgccctcccacccccaccacacttgtcacaatcagatgtcacagtctgatagcaggtccctgtcacaaaatacctcacagcctgacctgcaaccctcagacccctgagagatgagcagggagctaagacactcctcatgccttgaccacaccctgtgtttatgccccttttgggtgggggcctgaacctccaggccctggatgtgccctgggtggctggctcagcctacagctagagggaagaagggagaccttgacgactcgaagtggctggctcctgctggcattcaacacccattggcctggatttccccaactctgggcaacttccagtccaggagcagaataaccagagccacggccagggccagggctggggcagattatttatttttagcagagttgctggcagctgcctggtgggtgctgggaggtgggatggggactgagtttaatcccttccctcttctgggctggggtatcctccccagggttcaagcaggcatctccacctgcaactctgtcagagctgcccccacccccaacagccctctcagggcccccaggggctcatggggtgacaccaaccctcacactgaaggttaggctcattagggagaatcttcaactccaggatggggagtgga

SEQ ID NO: 95444 - DNA, 50862 bp, Homo sapiens
aggagatcaagaccatcctggctaacatggtgaaaccccgtctctactaaaaaatacaaaaaattagctgggcgtggtggcgggcgcctgtagtcccagctacttgggaggctgaggcaagagaatggcatgcacccagcaggcggagcttgcagcgagccgagattgcaccactgcactccagcctgggcgaaagagtgaaactccgtctcaaaaataaaaaaagagatgtttgagctaagatctgaaggatggcagaccttaagctagctagagaaggtattgcaggtagctagccaatagcttggcaagtttgagaagctaagagcagctgagtatgactggaacagaaaagagggggctgcagcagtgagatgaatccagaagggcagattccacccagcagagggcagggtaagagtcacaagcagtgctggactggcctttccaaccgtgttaaataaaacatttggaccattcccaagggtgaacaggaagccattgagggcttatgaccttgatggaatcggtgcttgagaaaactcaattttgtttggggagaataagactggagtcagaaacttggtcccactgatcatacgatatagtaacacaggaagattaagggtagctttgttggcatggagacatttcaaagctataaacagtacaggaggcataattgacagttttcccaatttctcttatcagtcaggataggctggttatgttgctttgttttgtttgtttgttttttgagatggagtctcattctgttgcccagactggagtgcagtggttcaatctctcctcactgcaacgtccgcctcctgggttcaagcaactgtcgtgtctcagcctcccgagtagctgggatgacaggtgcccgctaattttttgtatttttagtagagatggggtttcatcatgttgaccaggctggtcttgaactcctaacctcaggtgatccacccgcatcggcctcccaaagtgtagggattacaggcgtgagccaccacgcctgggctggtgtgttgctttaaaacaccaaaaaaatttattggcttaaagatttatgtcttatatgctaaatactcatcaggggttgacctaggctaacaaagcagaactggaggactgccagccattgtgacagaaccaagaaagaaaacaggtaatgaaacaggcattggctttgaaaactcacctgaaattgatacacgtgacttctgttttcaatggaccaagcaattcacagccacacccaacttcagttgcgcagggaaatgcaaccctttttgcccaggagtcagaatatttgtgaattgctctgatgactacaacaggccactgtttcaattattttactttccttccttcaagaaaatacacatcatggaagaaaacctaaaagtgcctgctagtcaggcaattgagctaaaattgtgtgtggagaccaggatctacgcacccagtacacagtggtgggacagggacagaaaaattgcaggaagcacttgccttcagaaaggggaagaatgaagtcaccggtcagtaacaattatgaaatgacactggaaaccatttgagggccctctgccctaacagaggggagtgttctttgtaaggcctattaggatgggttccctgctccaccattttccatgacttttagccccatccctcatttgctgtacacattacctgtcattcctgctttcaaactggctttaaaaaaaaaaatctaactgggcgcggtggctcacacctgtaatcccagcactttaggaggctgaggcaggtggatcacctaaagacaggagttcaagaccagcctggccaacatggtgaaacctcgtctctactaaaaatacaaaaattagctgggcatggtggcacgtgcctgtaatcctagctactggggaggctgaagcaggagaatcgcttgaacctgggaggcggaggttgcagtgagccgagatctcaccactgcactccagcctgggcaacagagtgagactccgtctcaaaaaaaaaaaagaaaaaaaaataacttggcaaatgcaattaataaataaccatggtactaagattgttttccaagttcttcaagtaatgtttcaagcttgttacatttcttcccttccaagttatcacgtgacagttttaccagaaggattgacatccttccaaacgccaatgtcagttcctccaatcaccgtccttccagctacccaagctgggaaaactatgtcgttattcttgactcccagtctctctcatctcccacatgcaatctgtaaatcctgccagtggattccatcaattctgttactattagatgttttaaaattttagttatacacaaagcaattacctgtaagccagacacacaagtacagacctcctaacaaatctgtgagattgttacagattttacagaagaaactaaggcatggagaggctaattaacttgtcaaggcacaaagctattaagtggcagaactgggattcaaattttgagtccctgagcttaatcaccatgttctgacctgaagctgtccctgcatgtctggctttgactgctaccatgactacttgccctccctgaatatgcttttcattagccaattccatatttctgaacatccctaccctcagtttgggggaatggctgtagctgacattctcctgagttggcctgctcctgccaggcaccttctgcttctattgtgtgtgtgtgtattgggctctgggccaaggcctcctaatatcaccatcccaaagctgttattcccaccttggataaaaacctgggtgaatcaacattaaatgagcaaagataaacttctgtttatttttttagagatacagtctcattcttttgttgcctaggctgtactggagtgcagtacatagctcactgcagcctcaaactcccaagctcggccgggcgcggtggctcacgcctgtaatcccaacactttgggaggccgaggcgggcagatcacaaggtcaggagatcaagaccatcctggctaacactgtgaagccccgtctctactaaaaatacaaaaaattagccgggcgtggtggcgggcccctgtagtcccagctactcgagaggctgaggcaggagaatggcgtgaatccgagaggcggagcttgcagtgagccaagatggcgccacggcgccactgcaccccagcctgggcgagagtgcgagactccgtctcaaaaacaaaaacaaaaagcaacaacaacaacaacaacaaaactcccaggcttaagtggtcttcccacctgagcctcctgggtagctgggactacctgcatgtgccaccacatctggcgtgtgtgtgtgtgtgtgtgtgtgtgtgtgtgtgtgtgtgtgtgtgtacggggtcttgctatattgcccaggctggtctcaagctcctggcctcaagcaatcctcccacttcagcctcccaaagtgctgagattataggcatgagttaccacacctggccagataaacttttgttgttgactaacattgttcacagaaatctgcctactattccaacagggaatttcttagggcgctccccgacaactttgttctttctgtttgggggttacccaaattagaaatccttttcactttgttatccagaatgatgtggtttcttctttgtcttgcctctggtacaaccccactgggcttatcccacaaccccactgggcttatcccaccccaatttaggccccacccatctttctcctccagaaataagtcccctccaagttttgagagagtcttgctctgttgcccaggctggcatgcagtggggtgataattggctcactgcaacctctacctcctggattcaagtgattctcgtgcctcagcctcccaagtagctgggactgcaggcatgcaccaccacacctagctattttttctatttttagtagagacgggttttcaccatgttggccagggtggtttcaaactcctgacctcaggtgatctgtctgcctcggcctcccaaagtgctgggattacaggcgtgagccaccgcgcccagccagacacttttaattgactaagattgctcctcaccaatcttaagatttttccccagatttccttcccaagctatctagcccagctgcccaactaggcttttctaaacatatctttaatgcttgtcatgataaggaataatgaccccctgattcctgtcctctgccactctattaggtatgattgacaatgttttatttttccagaaatgttctttctttttggtacagccactgtttcttttatttttgtttttacagaaaaaaaggccgggggaggggggtggtgggtggtcatggtatgcatacttctgcacctggcttttttctcttggagttccttccacatcaacatagagacctacttcactttttattatttatttatttatttagagacaggatcttgctctgtcatccaggctggagccccggggctcaataatcacagctcactgcagctatcctcaagctatcctcccacctctcagcctcttgagtagctaggactcctggcccaacctactgccatgacaccagctaatttttttttttaatagagactgggtcttgctatgttgcccaggctggtctcaactcccgggctcaaccgatcctcccacctcatcctcccaaagtgctggtattaccgctgtgagcactgctctcagcattcacctttaaaaacatatctctatctatctatctatctatctatctatctatctatctatcatctatctatctatctatctatatcacggtttatttagccacttccctactggacatctcagtgacccagttctgttgttttggcatacaatgctgcagtggacaaccttctccatgtagttcattttaatcaaacagcgacttcaaattttgatagagcctccaaagaaacgctagtatcaagccagtttgagaatttagtatgccactctctcccctactgaaaaccttcttccaggggcaatgtaatggaaaggacttgggttctgcgcctagaaccaaggagccttgggtctttaacatctctgggcctcatgtattcgcctatgtaaagtcggtataatctcgcatctcaggttggttgtgagaacccagagactgcctccgtgaaggcttggcatcagcataggcctcggctgtcctttagtttcagggtgtcccggggcacgggccaaaacctcaggctgaacctgctagaggaaccttcctgtcccttgcagattaggaaaactgtggcacagaaagcgccaaggggttgatcaagacccccacagctttggtccacgctgctgccggcggcttcggatcctggtcccgggggactgcgcacatttggatgtggtcagcagggaggcctggcctggccccttcctcttctacccagtcctctccccgaaccaattccgacccctaacgcccacagtcctcactcgcttacggttcgacccttgccccaggggcgactgggtggggccgtcattcctgaacaactaaaagctgctgcggccagcgtcacctccggccccaacggagacggtgggggccgtgaggcttagggactccgcgtcctccctcctgctgggcctcagcgtgccctctgtacttgccttctgctaccagtgaacgtgagtgggacgtgtgtgtagacagcagacgggtcttgtgcagctgtgtgacgtgtgtgttgtgtggtgaacccttctttatgtagatatgtgaagtgtgtgtgctgtggtgcacagatgtaggggctcacgaagtactgggctccttgctcctagagcccgaacagttcccaacgttacagccctgcccgactcagcctccgcagagacggcggcgggacccgcagtttgcgcgtgcgcggctccgccccaggctcctccctcgcgctggcactcccgccttcgcccggccctccccgcgctttacggcccggcacgccacttttactgcagtcgcgcccgccgccgtcgttgcccccgctgccgcggctgctgcaggtgaggtgaagtgaggtgaggtgtggtgttgggccggtgctgctgccgctgccgccggggaggaggtggaaagcggggctgtggcgggccggcgggggcggcctgtcagccgctgctttgtctccttagctcgggtcccttctgcgctgccgcagggaggccgcccgggccaggcgagccgaaccaatgctggacctggaggtagtgcccgaacgctctctggggaacgagcaatgggaattcacgctgggtgagtttggggtcctctgtcaggaccccattcgctgatccttgctttctcctgggctcttcccacctgttctcagtctctcacgcccctgcgcccgcagctcctcacctctttcgtcctctcggctcgctgggctccaggcactagataccygctccaactggcccgatttgcctgtcagttgctcgtctcgggtctcagcagggtctcttctgggacggtggracagtagtagtaaagacaataatagcttgctctccccaaatgcctaatgcccggccctgctctttttggacgtaattctctctagtacccctcgccggcacctgaggataggtactgttgttattcccatttccattttacagactaaataatggctgagaagtggctgacccctctgatcatcactgtggcctgtggtctgtctcccactgcttttctgggctgtggcttccttcccctttttaggaggggaaacctaggcttggaacccatgatcagatgttggggctctggtcaagggagttgagtttgtgtgtattaaaggaacagctgacttgcttctctcttttttttctttttttttgagacgaagtctcgctctgtcgcccaggctggagtgctgttgcgtgatcttggctcactgcaacttaacgcctcgtgggtttaagcgattctcctgcctcagcctccccagtagctaggattacaggcacgcgccaccacacccggctaatttttgtatttttagtagagacgaggtttcaccatgttgaccaggctggctggtttcgaattcctgacctcgtgatccgcccacctcggcctcccaaagtgctgggattacaggcgtgagccactgcacccggccccgcttctctctcttttgaaatatagtctgtatcggatgctgtaatcctaaacccagacctcagttgtgacaggtgaaggttggatgaaataggagttagggagaagtaacatttagtttctaaaaaatgcagtttggtcgttttggggtttgctggcccagccttctcccttcaccctctccatttccagcatcactacttttatgtgtacaaggatgtttgcattcagtaacccctgtgtgtttactttgatgtcccagcactaagaaaagggggtggggtaggtgttggtgctgtttgtttgtgcaggcctgaactttagtcactctagtgtgagctactggactaaatcagctgctccattggattataaattatccttgactctggaagacttatgtctgtggagacagtgtgttggagaaaccaggtggtacwgattgctggtaaggccctgctgatgcttagtggctacatatgtcctgtgtgttgtaagagctagtttttgttgttggtgttttgttttaagacagagtcactctgttgcccaggttggagtgcagtggcacaatatcggctcactgcaacctctgcctcccgggttcaagcaattctcttgcctcagcctccctactagtagctgggattacaggcgtctgccaccacacccggctaatttttgtatttttagtagagattgggtttcgccatgttggctaggctggtctcgaactcctgacttcaagtgatccgccttggcctcccaaagtgctaggattacaggtgtgagccaccatgcccaaccataaaagccggtttaatttaggggagttggccaaattctttcataacttaacaccactcctgcagagttctttccaaaatattagctggtacaaaatgctccattctctcgtgaagcactaagagcttggttggaaggctggtgataccatgctaatgctgtttggcttctggttaactcctttcctcccctctccttgacagcttctacccaagcaagatcctcccacggctggataaaaaccacaaccatagcttcaaactgtgcttagtagtgtgactaggttgtggatctcttggtggtacaagtattcagagtcccttggtcaaaagcagtggtagggactgggtgcagtaactcatggctgtaatcccaacactttgggaagctgagacaggaggatagcttgaagccaggagttcaagaccagcctaggcaacatagtgagacctcgtttctaccaaaaaaaaaaaaaaaaaaaaaagccaggcctgtagtcttaactactcgggaggctgagatggaaggatcacttgaggctgggaggtcaaggctgccgtgggtcatgatcacaccactgggcgtgatcctgggtgacagagagagaccctgtctcaaggagacaaaaaaaaaaagtagttactaggatattaattgagatgaggatttccagaaaactgagtgagagagcaaggcttctctcagctgttgttttgataccctaaccctgactcctagctctgctagtttcccaggaatcaagggtttacacagttcttacaaactgtctaaatagcaaccaaaaacagtgagaagggcatttctgtatattgggtcaagaattgaattttagggggaagctcatagactggcccagaggcttcatgattcccttgggtcttaaaattcatttttacatggtgtctgcctgagagatggtgttaatttaactttatcagactttaaaaatggaaagtcattttccacctctgtcaatctcctcccccaccctgaacacgtccaaactacatttggggctgttaggtagggataggtctcggaagggaatctgctttagaattacatgcctaggctagtgaaccaggaagaacttacctcttgccaccacaggcttgtaagataggtgttgttatctctttttgccaggtgagggacaggctcagagagagagatgataaacaaaagtcgccaaacaggcatatcctgcatgccactgctctttccttctgaaagtggactcaactttgtcaccaggtttcttattggaatctgtgcaaatgcagatgcaattatctgcctggcatcacaatgggaagctgcatcctggcagctccttggctgccttcctggttgtataatgttggatgattagggaaatgcgagcaacacagggaaaggaaaacctaggccaagcagaatctctgtgaatatgaatgtcactgatgatttgaccagcagtggagtaaaggcagtgcagatttgaaatgttttgttttctttttttctttttcttttttttttttttttgagacggtgtctcactctgttgcccaggctagagtgcagtagcgtgattttggctcactgcaagctccacctcccaggttcatgccattcttctgcctcagcctcccaagtagctgggactacaggcgcccgccaccacgcccagctaattttttgtatttttagcagagacagggtttcaccgtgttagccaggatggtcttgatctcctgacgtcgtgatccgcccacctcggcctcccaaagtgctgggattacaggcgtgagccaccgcacccagcctcttttttttttttttttgagacagagtcttactctgtcgcccaggctggagtgcagtggcgtgatcttggctcactgcaacttctgcctcttgcgattataggcttgcgcacaccaggtaattttttacttttagtagagatggggtttcacgatgttgaccaggctggtctcgaactcctgacttcaagtgatcctcccgtctcggctcccaaagtgctgggaggcatgagcatttgtgccgggccctgaaatgttttcaatgagagttgcagaatgtattgatgcagaggcaagtctctgaatttgtttttgaaattagtcttgaaagggactaaaaaaggtagatttaaagggtcagtgaagaaaataccttctccgagattaccttgttccacagagactgaaggctcactgtgttgaaggcatcatctacctctgtgaactctgctcacaaacattgaaaataaacagtgcacagtgactcatgcttgtactttgggaggctgaggtgaggggatcacttgagccaagagtttgagaccagcctaggtaacatagtgagaccctgtctctatttaaataaaaaataaataaataaaaatttaaaaaaaaagaaatgatcttattccctgaagagcttagtctagtgatagagagggattatagaaatagttccttttattataatcaagtagaagatgtatagggtactgtggaggggaagaagaagggacttgacctgacctaggggttcagagaaggcttcctgccaaacaacaggagctggaaatcttccagtcgaatgaaagaagaaaaaaaaaaaaaaccacaggagaaaaggtagatgatgtgtgcagggaactataagcaatttggtattataattagagcatgatgtactggtagaagaagaaaatggatttcccagagtcccaattctgtttggttatagctgcctgggatactatcaaggatactttgtgttggaatctgtgcaaatctgtggaaaaaaggatatgtattagtgaagtgtattgtgggctttcgtttaggaagaactggatttggagaggtggggaagaaggaggaatctagaggtttctgacttgagaaactctgtatgatgttggacatagatattgagacctagaatacagagaagatgaaaagatcacttttaatctgttggcttttatttgcctttagatgtatacagaaaacagatggagatatgagtcagaaactgggtggttagttgaaccagggatgagcagaagaaacatagcctattggagagacttggaaaagttagaggagagtagtattggtggagagacaataggagttcaagagaaggagggtggtcaacaggattcgtggtataggacctaagtgttctacctaattgctttgtttcacagatgtgcatgaccacctacagctgtgccaggcacagtgattgggtgctgggaggtattgaggtgaacaagacagacaaggtcctacctctgtgaggatataagggagactaacagataaataaatggtatgagaggcttcattgaataaggcagtgagggaagtgaggtgtgaccaagacctaaagtgcgaacaagaggcagctttgggtagagcattccagattccagcagcaacaagagctaattcagaagcctgaggtgagaaggagcttgacgtgtgcaagtaacaaagggtgaacagtggaaagaagatatagatgggtaagatccagaatattcagggcctttggtgatgacatggtgtttgggttttatctgcctgcaatgggaagccattgagaggttataagcaggcaagtgctgagatctgtgagacaaagatttgtgcggtttagaaggctgaccattctgttagagctgggatagtgctcctgtttctttgccattcatatagttagttccctttagagatctttcgtagccctcctttaccagtagctgtgtgatgaccagtcaccatggctgcttcgtctcctctgggtgagtttctccctgggtgactcaggatcctaagatcctaagatgctgagacatcctttgatgtggtaaatggaatcctccctcaagaaactggcatgggctgggagcggtggctcatgtctataatcccagcattttgggaggccgagacgggaggatagcttgagctcaggagtttgaggccagcctgggtggcatagcaagaccccgtctctttgaaaaaaagaaaaagaaactggcatgtgccacgtggatcagagaagccatgcggccttcctctttcttgacatctaactaactgagtttctctgtcttctgcacgtggatgtttgtccattcctcctgggaatgacagcatagatgttcctccatttaggaatggcaaaggtgagggatgcatccagcttgttcatattctcaaacatttattgagtccctactgtgggccaggttttatgctatggaaggctgaaaagtgcttttttaaagattataagtcagccttgtgatgattgccttcaactttcttcagactgaagaatggcctctcagatgagggtagaatcagattgtttaaatgtagatgagccatgagctttttaccttctaattaattcttcatttgtcagctcttttttgcatatcgcatctctttgacctggaggccaactgatttaaatgtgaactgactgccatcggatgaagccatggtcccttttccttcctttctcttgtcacccactctacaatccatcagtcccactcagtaaatatttattcaatagtcactgtattggccacgtgcggtggctcacacctgtaattctagcactttagaaagcggaggtgggaggattacatgagcccaggagttcaagaccagtctgggcaacacagtgagacctagtctctaccaaaaatttaaaagttagccagttgtggtggcacatgcctgtagtcccagctactcaggagactgaggtgggagtatctcttgagcctgggagacagaggtttcagtgagccaagattgcaccactacactccagcctgggtgacacagtgagattgtgtctcaaaaaaacaaaacaaaaccagtcactgggtggttagctctgagcagggtacaagggatccagagagtggtgaacagcagatacattgtttttgtattcattaaactatgagtctttgttttttgattgcccaggacctgtctctatgtgtgtttcttcttgtttaaattataatggactctggaaacaaacttttttttttgagacggagtgtcactctgtcgccaaagttggagcgcagtggcacgatctcagctcactgcaacttctgcctgccaggtttaagcaattctcctgactcagcttcctgagtagctgggactacaggcacacaccaccatgcccagctaatttttttttttttttttttttttgtatttttagtggagacagggtttcaccaagccggccaggctggtctcaaactcctgacctcgtgatccgcctgcctcggcctcccaaagtgctgggattacaggtgtgagccaccgcgcccagcctggaaacaaactttttggtggtctcagtgagtccttagactgttggagatgtcattggaatttggattacttaaactggaggcatatgtaaatctgcttataatgggccatgagttaaagaaccaagtgttaagagttagatattcaggccgggcacagtggctcatgcctgtaatcccagcactttgggaggccgaggcggtggatcacgaggtcaggagatcgagaccatcctggcttacatggtgaaaccctgtctctactaaaaaatacaaaaaattagccaggcgtggtggcgggagcctgtggtctgaggcaggagaatggcgtgaacccaggaggcggagcttgcagtgagcggaaatcgcaccattgcactccagcctggacaacagagcgagacttcagactgcgtctcaaaaaaaaaaaaagagatattcaggaatgcctcgccctgttgctttttttttttttttcctcctgagacagcacctggctctgtcacccaggccagagtgcagcctccacctcccaagctcaagccatcctttcacctcagcctcctgagtagctgggatgacaggggcacaccatcatgcctggctgatttttttttttttttttgagatagagtctcgctctgtagcccgggctggagtgcagtggcgcaatcttggctccctgcaagctccacctcccaggttcatgccattctcctgtctcagcctcccaagtaactatgggactacaggcgcccgccaccacgcccggctaattttttttttttttttttttttttcttttttagtagagatgggctttcaccatgttagccaggatggtctcgatctcctgacctcgtgatctgccctcctcggcctcccaaagtgctgggattacggacgtgagccactgcacctggctgcctagctaatttttttgtattttaataggcatgagccaccgtaccctgcccctgttgctttttttttttttttttttttttgagacagagtcttgctctgtctcccaggctggagtgcagtggcgctatctcggttcactacaacctctgcctcctgagttcaagcagttctcctgcctcagcctccagagtagctgggactacaggtgtgtgccaccatgcctggctaatttttgcatttttaatggagacagggtttcaccacgttggctaggttggtcttgaacttctaacctgatgatctgcccatctcggcctcccaaagtgctgggattacaggtgtgagccaccgggcctggccccttgtcgctatttttaaattaaataaaaaataaaaagaactagatatttgtgggattttaagtaaaaatccagtgaaatccttggtaaaataagttgattcattgattctggtggatgagtgatcttaaacttttttttttttttttttttttttttgagatagggtcttgtctgtcacccaggcgggagcacagtagcacttatcatggctcactgcaggatcaacctcctgggccgaagcaatcctctcaccttagccaccccaggacctagagtagtcccggcatatcccaccatgcccagctaatttttttactttttgtagagacaggatcttactatattcccaggctggtcttaaattcctggcctcaggcgatcctcctgccctgccctcccaaagtgttgggattacaggcatgagccaccacacccagtcctgattttaaacttttaaaattgttccttataagtcatgtactctaataggccttcatttcagagatgcagagacaggtgccagaaaggaagagaaaggacctatctcaggtcatatctaagccatggcagagtgaggaccaaaacctgggtctgcagaattatgcagtcagtgcttttcttgcttggttctttgattcatacttactttgctttctctgagcgcttgtctgtgtcagatcagtgtggaggtccctgtttccaggaagactttttgtatattcactgcctcccatccccttccatgcatgtccaaccttttggcttccctgggccacattggaagaagaattgtcttgagccacacataaaatagactaacactaatgatagttaatgagcttaaaaaaaataaaaatgtaaaaagggtccatgcatcatacgcatcttttttttttttttttatagacagagttttgctctgttgcccaggccgagtgcagtggcgtgatcttggctcactgcaacctccgcctcctgggttcaagcatttctcctgcctcagcctcccgggtagytgggactacaagggcagccacctcgcctggctaatttttttttttttttttttttagtagagtcagagttttaccatgttagctaggctggtttcaaatgcctgacctcaagtgatcctcccaccttggcctccgaaagtgctgggattgcaggcataagccaccacgcccggcccatgcatgatttttgtgatatccaccaccacagataagcaaaagagtccttgcattcaaagagttggacacctgtgcaccgtccaagtattctcttagtgcttgctgcttaacattattgtagctcttactgcttattgaactcttatttactcatgtatctgtagaccttagtagcccccaaacatccccaggctttactgcagggaccagtgcctagtgaagtggtagatgtcaatagatggatagccaaaataaccacataggtgtcttgctttatttcaggaatgcctctggctcaggcagtagccattcttcagaagcactgtcgcatcatcaaaaacgtccaggttctctacagtgaacaggtgagtggtggctgatttgtttattgaaatagcatccctcggtagtgagtcacttccagagctgatgctttgggataggctgactggcaaggatagctgtgttcgaatgggagaatctctagcaccagccagttatcaagtaccttttctttgattctgaaacttctgctcttgattatctartacagctaggtttggaagagcggtagtaattgaacctttgttttgtctgtgctcaacttgcctacaggcccttaaacagggacttttcagtggtaggtcgcttcagaggctgtctctggtcttttagagtgcttaccttccacttccgtgtttaaaattgtcttttctgcttttgttggttagtttgtgttcaggatttttgcagtgcagatctctagctagcacggcataccagatttgaaaggaaacagatataattcacccctttatctctctcaaagagcaatcttcccaccactgaattctctgaaacctgcagttctgtgacacagaccatgtgctgccatgttgaacagcctttgtggtgtcctgtgtgtcacaagcctcagggaatagttttgagcctacagaggctaaaggatgtccccagtgacttttctgagaccctttgagtactagtttgattatttcagttccaattagtttcagatcctaaagcaaatgacagcttatttctgacatgaagaatgttgtaaattgtaggtaggcaaaatttctgagaggcttctcagtttgacttggagcacagtcagaattgggcctgttacctatacccagagattacattctgccatgttgtacccctctaccagcctagtgagaccctcatttgagggatctgatagaagacatgcttaatctccaagcaagtgcttgagtattcatgtggtgcctatgacagaacaggagacttgtaggagtgggcatgtggtgcctatgacagaacaggggacttgtaggagtgggcaggggtttctttttttttttttgagatggagtctcgctctgtcgcctaggctagagtgcagtggcacaatctcggctcactgcaggctccgcctcctgggttcacccgccattctcctgcctcagcctcccgagtagctgggactacaggcgcccaccaccacacccagctaatttttttttttttttttgtatttttagtagagacaggttttcaccccattagccaggatggtctcgatctcctgacctcgtgatctgcccgcctcgacctcccagagtgctgggattacaagcgtgagccaccgtgcctggccaagagtgggcaggggtttcttaaaccaccatggattatcagtgccaaagtggattctcgttaattaaattaatttatttactttttttttttttttgagacagagttttgctgttgttgcgcaaactggagtgcaatggtgcaatctcggctcacctcaacctgcgcctcccgagttcaagcgattctcctgcctcagcctcccgagtagctggggttacaggcatgtaccaccactcccagctaattttgtatttttagtagagacagggtttctccgtgttggtcaggctggtctcgaactcctgacctcaggtgatccaccggcctcggcctcccaaagtactgggattacagacgtgagccaccaggcttggcctatttaacttttaagaaaatttattttagtttttttgagacagtatcttgctttgtcatccagactagagtgtagtgacatgatcacaactcactgcagcctcaatcccctaggctcaagtgatcctcccacctcagtctcctgagtagctgggaccacaggttcatgccaccaggcctggctaatttatttttatattttgtagagatggggtctcactgtgtttttcaggctggtctcaaactcctggactcaagtgatcctcccacctcagcctcccaaagtgctgggattacaggcgtgagccaccgtgaccggccaaaatgtatttcttatatcaccatcatcattgtctgttattccagtatttgggtataaacagtgttagcattaagctgattttccccaatatcttctgagcaactttaacacattagcaaatatgggtttgaccaggcactgtggctcacaccactaaccccaacacttcgggagggccgaggcaggaagattgcttgagtccaagagttcgagaccagccagggcaacataaaataaaaaattaacctggagtggtggcacacacctgtaatcctggctattcaggaggctgaggtgggaggatcatgagcagtgaggtatgattgtatcactgcacttcagcctaggtgacagagcaagaccctgtctcaaaaaaaaaaaaaaaaaaaatgggtttttgagtctgaatcctgatttagatctctgcttttctcatttctaattcatgagagttgtggcatattaataagtaatctggttatctttatgtaaaacagtatagtttcttgataatagaataatctttgggtttgtttatttgtttctgagacagagtcttgctccgtcacccaggctggggtacagtggcacgatcttggctcactgcaacttccacctcccaggctcaaccgattctcctgcctcagcctcccaagtacctgcgattacaggcacatgccaccatgcctggctaatttttgtatttttagcagagatggggtttcaccatgttggccaggctgatctcaaactcctgacctcaagtgatccgcccgtcttgtcctcccaaagtgctcggattacaagcatgagccaccacacccagcctaggataatctttggatgaggatcaaaaggagatggtctctcagaactctgatctgatgcttttttttttttttttgaagcagcatcttgctctgtcaccaattctggagtgcagtggcatgatcatggctcactggaacctcccctacccttcctcctttagttttgccactcctgggctccagccgtcctcccacctcagcctcctgggtagctgggaccacaggtgtatgccaccacatctggctattaaaaaaaaaaaatttggccaggtgcagtggctcatgcctttaatcccagcagtttaggaggccgagacgggcagatcacttcaggtcaggagttcgagaccagcctggccaacatggtgaaaccccgtctttactaaaagtacaaaaattagccaggtgtggtggtgcatacctgtaatcccagctactggggaggctggagcaggagaatcacttgaacctgagaggcggaggttgcagtgagccaagatcgtgccactgcgctcctaggcaacagagtgagactccatctcaaaaaaaatttttttgtagagacagggtctcattatatttgcccagactggtctcaaactcctggctttaagcattccgcctgccacgacctcccaaagtgctggcatgaaccaccgcacccagccaatgtgatgcttcttaaatttgggtcctgtcctcttcttctgcctactttattcccttccttacccatttgtctctttgtttcccaaatgcagaaaacattttgtctgcattaaacatttcagaaatatgttcttgtctctatgcaaatcacaccttggaaatgaaatgtcaagtacgtcccatctttcttagagggaaaagatattaacaactagtagcagatgattttactgaactgcttcatgtgaaggacagctaggttactggaagaacctgcttaaataccacatagtgcatgtgtattttggttttagagatataaagtattaataaaacattgactctgagagtaatttgattgcttttgaaaattgctaggttatatcctgaattataacaatgccaggaaaaaaaaaaaagatcagatcttgggaaagtataggaaaatccagatcctggcacatgcctcctccaagcaagattcctgaaagagactaaaatgttgcttcactctgcttattccatggaatggctctctccaaaatggaactttgtgttctgggttgatactggtaatccaaggtcatagttcattgttccattatcttgcttgagacctaatggtttagacattcatatagacctactagcaaatacaacattcttcctttartttttgccaagcatgatggtactatctgggcctgctgctttgtggggatcaatgggttggaaggaagcaacctgccctaatcccaaaagactcttaggagagaatttctccaatgaggccaacaccagcagtggcttatggccttccagcctatgtctgtctctgatagccatatctccatcattcactttgtctaacttgagaagctctataaagaaactaaacctttggccgagcacagtggctcacgcctgtaatcccaccactttgggaggctgaggcagatggatcacgaggtcaggagatggatcacgaggtcaggagatcaagaccatcctggctaacacggtgaaaccccatctgtactaaaaatacaaaaagtcagccgggcgtggtggcgggcgcctgtagtcccagctactcgggaggctgaggcaggagaatggtgtgaacccaggaggtggaggttgcagtgagccaagattgtgccaccgcactccagcctgggcaacagagagagacttcatccaaaaaaaaaaaaaaaaagtaactaaaccttttgagcagccatgtgttaaagaagggtggggttttagatggtgtttttccttctactattgggcagcctcaatcagggctgtggagaatcttcagacattgaatccttgaattaattgcattggaccagaagcatgcagatggggcagacacaagaggagagtgctgtgtgccaggtattgggctagatgctttctgacctactatctctgtcctcataacaaccctggagggaagggatgaaagtattcccatgaagaaaccagagctcagagaagttttgagagttacctaaggtcaccagggttctgtccactgctttgttctgctactcccctcccccaggattcagaaggggcaaatgcagaaatatgactctttagatcttagacttcggcttttcaggaagaagcacaaatgaaatgggatgggaggctggggggagagagaaaaaggataagagggtcatctcataatcagatcacaatatatttctttgtcctagaatttgatctaaaccatcaaagaataaaaatgtgttccctgtggatggtacaaacagcctgagtgtgaatggatgtaggttcagctgataggcataagcaatatctgctgagtttagatcctggactaggccttttcacatgacctgtattcctcaccaactgctctgtaggttcgatggcagtgaacttcattttgcagatgtggaccctggagcctgaaaggagaatgacctgtatactcatataactttgtcccttttccccaggtatttttactcaagcccagaagggagaggctcttttcagccgatattaagaaacagcagctgcaggctagaagtaaaaaacaccatatgttcatgcagcagtttttttctggtttccaagcaccattagctggaggagagasggactgtctgcacttagatattccttgtgtgttgcatttgtattgtaaggctttcagtaggtgcttagtgaataaatcagttactcagaatgtattttatttttgttttgtagtctcctctaagccatgacctcattcttaacctgactcaggacgggatcaaactaatgtttgatgctttcaatcagagacttaaggtaactataaatgacaactaatgtttcatgtccagctgggccagtctttctggagctaattagtatgtgctattgtgagatgtttcaaaacttataagtaggtgtggacttctttggttcagagatcactacaatgtagggaactgaagctgtgcctgttcccctaaaaagagggaagatggaagtgggttgggatggtcagaaagaggctgggaagggctgctttcccaggctccagaggggaaggtgaaagagtgttgaagatttgggaaacatgctgtggggagggggctttcatgtccagtaggaaaacaagatagttttacttcattcttttgtcaaacactgtaacttggttagaaaatggaaactgttcttcctagaatgctggggcttgggttaacaataccagcaatgagttgattctttaaccctggggaggaaatgtaaaaaaacaacttactaatatgtagggctatcttaattggcatttgagtgcaatttgctaacacctgtttgagtccagtctggttttctttgtttttgtttttggtttttttttttttttttgagatgaggtctagctctgtcacccaggctggagtgcagtggcttgatcttggctcactgccacctcctgggttcaagcgattcttctgcctcagcctcctgagtagctgggactacaggtgcacgccaccacgcccagctaaatttttgtatttttagtagagatggggttttaccatgttgaccaggctgttttcgaactcctgaccttgtgatccgcccaccacagcctcccaaagtgctgggattacaggcgtgagccaccatgaccagcccagtcttttttttttttttgagacagagtctcactgtgtcacccaggctggcgtgaagtggtgcaatcttggctcactgaacctctgcctcccgggtttaagcaattctcctgcctcagcctcctcagtagctgggactacaggtgcgtgccactacgcccagctaattttttgtttcaccatgttggccaggctggtcttgatctcttgacctcgtgatccgcccgcctcggcctcccaaagtgctgggattacaggcatgagccacgaacccagttcagtctgtttgatatccctgtttacaaatgcctgggcctcacaggttagtcatgtgacaccagagtcatgcctcaaagtcatgaggttggatgggccctgggcagtggcatgccagagttgttgtccttcttgggttatggagtagcctttccaaaagacttgggtacttaccagttctcatcatccttgtcacaagtgaactgctaaggagagaaacaaacatggaaagagaatcagtatgtggaattagaattcctcattctatcctgtctccatggccagaagttccacactgggaaagggcagaggatgatcttcaatatcgcataatcacaaattggagccgggtgcagtggctcacgcctgtaatcccagcactttgggaggctgaggcgggtggatcacgaggtcaggagatcgagaccatcctggctaacacggtgaaaccccgtctctactaaaaatacaaaaaattagctgggcatggtggcaggcgcctgtagtcccagctacttgggaggctgaggcaggagaatggcgtgaacccgggaggcagagtttgcagtgagctgagatcgcaccactgcactccagcctgggcaacagagcaagactccgtctcaaaaaaaaaaaattggggggaaattaatctggtaacatggaaatttctttacaagtagtcatttccctttgacttggtaaaagtccactttagaaaatgtaacccagaaacactgggggaaggtaacggtatttcatggtaatgagaagctggaagtaacctaaatgggcaacaaaagggatgtccagcagcccataaaatcacagcatggtgaagacaatgtcatatgtttagtgagtgcttagtatatgctaggcacatggctgggtgtttcacatgcgttttctagtttaatcctaacccgcctgtgagtaggtactgtttactagcaagaaaaccgagggacagagaggataagtagtctacctgatgccaggcttttaactggatattggcaatatgtggtggctgaccacttaggctctgttgatggatctgggaaataaataagaaaagctgaagaaatgtacagaaatatgaggaatgggaggtacctttggataggaaaggagataaaatcaaaccggcaatcctcttctgccttctgtgggatccccatgaaggagagactggggtcctgcctgagtcttctggaaactgagcaagtaatcacccaggtgtttttgattggcaccagcctgacctgacctatcttcctgcccttccatccaacaccttcagaatccacctcttctgatgctgcctcctatagttgcttcccaccccctgcctcaagcctaagagagacagccctgtggaatgaggctttataagtcacaacctttacagccacctgtcttttccatttttatcttggctgctgccacatctcttcccctctggggaaatcaggagcttctgtagcccagagatggaaaatcatgggctttakccttcccagctgcttgtccctgtagtgcagcaagctccaagagatgaaatctgcttattgatgctcctagtgacatgaaggactccaggatggccagcactctgggtccattgccacaagtgctgcttcgtgccctgtgattagctctggtccactgttttcccattgatcaggcagggtcgaagcacctatatgtgttggacccgtatagctgttggcaggtggggtgccagtgatacaggaggaacatcgtgcaggctcacttccacagggcgggtggtgggaagctttgggggatgactggccagctgtagggatagaagtgagggaggtgagtgcctgtgcctgctatgaacaggagggcttctggctgaaggtagaggctctctgctagacaaggctctggcctcagtgaaatggcatgccagtttggcatgatatattcccatgcccagatattctgaaggggacactggctatcttctgaatcatagctgttcccctgcccttccttccacagcccctcctggcacttcttttcatgctttcaagcttcataccaggcagaattgcctaacatgaattgaacaccttccctatgcaaattaatgagtccctcaaggggcttaacttattggaccacttaacagaatacacaagtatggaggaaaggattcattccagtgctgtgacggcctagcagagggagcagttctttctagcagataggatcaaaagagctacattatagtcaagaggtatccaatttggttcagtgttgtggtctctaaataaagttagggatagggtctctggccaaaagcgaacctactatctattatgtctcagtttctttggcagtgccagatgttcctgcatacaatgccccacagcctcttccacaatcaggctcagattggcaggacaaacagatattgagccagctctgcttgtgtctccacaatgagagcaaaacctcccagctggaggatggtagatggtgctccgagcccctacctgtgctgctggctgccaagcccttgacaccattgcatggaggacttcatagtgcttattacttggcaccactgatggcggagtgttaggtgatgcctattcctttatctctgccctgccctgagttcttagaatttcatctgaggctgaacccattaaagagcaagcttcacaaaggtcctgaggctttcttgtttcaaccagatcctcttcatcagggacataactgaatactgtcacacttgtgtgacaaatattatggcttgctttctaatgggatagacctccccctccatctttttgttttgtaaacaaaatcaacttcaaaataagctattttctttctttctttctttcttttggaggagtctcgctctgtcgcccaggctggggtgcagtggcgcaatctccgctcactgcaagctctgcctcccgggttcacgccattctcctgcctcagcctcctcagtagctgggactacaggcgcccaccaccacgcctggctaattttttgtatttttcagtagagacacggtttcaccgtgttagccaggatggtctcratctcctgaccttgtgatccgcccgcctcggcctcccaaagtgctgggattataggcgtgagccaccgtgcccggccttttttttttttttttttttgagacggagtctcgctctgtcacccaggctggagtgcagtggcgcaatctcagctcactgctacctccaactcctgggttcaagcggttctcctgcctcagcctccacagtagctgggattacaggtgtgtgccaccacgcccagctaatttttgtatttttggtagagacaggatttcaccatgttggtcaggctggtctggaactcctgacctcaggagatccacctacctgggcctcccaaagtgctgggattataggcgtgagccaccgtgcccggctaaaataagctattttctaaagcaacccgacctgggttttaaaatgcagcaaaatatgagatgggaggaagggggcttagtgcccaaagcagagccttaacaagcttcatgtctgtggaagagatcattgtcctatagggtggtgtgtgctccagcctgacccagaagtggactgcatgtaagagccttgacccagagcatccatggacatctgttgagcagtccactaggagagggaagctaagaggttatgctgaaggggacactggctatggttatgctgaaggggaaactggttttttccctggtttcaaaataacaaaggactgtcatggtggctcatgcttgtaatcccagcactttgggaggctaagacaggaggatcatttgagcccaggagtttgagaccagcctgggcaacatagttttttagttttgctaagattctatctctacaaaaagtttttaaaaaaattttaaatgagaacmaaagataacatgcagtgcttccataaaatttctattggtaatagttttttttttttttttttttactatttattctataaatgtatttttaatcatttttagtctgtcatcactttcagagcattgacaactcttaaacttttttttaggtgatcgaagtatgtgatttgactaaagtaaagttaaaatattggtaagttttctcccctgctggtatatgtcacacttggtatagacaggccatatctactatcttcataagttagtaaagattcacatctgtcacagatgtgaattatagcctggtgccatgaattcctgaggcaaccttcaagcctgctcagtttcctggagaagagaagtaaacctcattaagaatatgtgatgtgtttaacacttcatgtatatgtcatctaacttaatccacttgacaaagccagacctcagctcagaggtgatgtgacagtctcctgggtcatagctgccctcccgctgacagcctctcttggcacctcttttcatgttttcatgagtaacagaggtgggacaaaccagataggtctgactccaaagcctatgctgaagagaatgccaaagagaccaccattttagagctataatgtattttttagaattacagcggggatgacatgcacagtccaaagttgttgcgcccccattatggcaaggcagcatgcctgcatctaaaaatctagaatactccttcctttctttctttctttcttttttttttttgagacggagtctctctctgtcacccaggctggtgtgcagtggcgccatctcagctcactgtaacctccacctcctgggttcaagcgatagaatactcctttcagtaagtctccttaactggcttycctttccctttttgagggtgtgaagaggacctgattcctggggcaggctcaggcagttttgctgatagaggagtagacaagcaaatgtgtggtaccactggcccctgcaggttctagttgtcttttagttttactggggccttcatacctcagggtctggtggcttctcttctctacccttttcttaagagtcactggtgtcataaagccccagaggatcaactctgtatrtcagcctcatgagaactgaccttctcctgacctcattaatgctcttatttaaaagttctctaattaagctttgtrttttgatataattagagactcacctgcctgtgtcttaaaaataactctcccagctactatctcacatgatctgtgggcccatcttgtgaagcctagtattaaaaaatatttttgtttttcagtggcgtgcattttaattctcaggccatagctcctaccattgaacagattgaccagtcttttggcgcaacccatcctggaggtaagccaagtccatctgattcctctggtcatcagtggcagttcatagcaataaacctgcccggtagtgccatcccaccccacttcctggagtcaggctcccataggattrtggggttggtacttgggtgtgaaggaaacatcctcccccttgttttcaacctagtaggccagtttagaaacaagccacagggaaggtgttgtcagtcattactccctgccaggctggtttatgttagccatttcagatgccagtcaaccatgttattttcttctcccccacccccaacagtgtacaactccrctgagcagctcttccatctcaacttcagaggactgtctttctcttttcagttagactcatggactgaggctccaaagtatgaggttagcccttcctgtcccctggtgtttgttgtatgtgtctgtggtatggctcagcagatggtgtcatgggatgggaatagaggagtgggtattagataggcagactttctttggtttccatgtatttgagctctacagggtaaagtggtagagtgggtgggttgacagaggaagaacaatgctcaggctggcattccgaggaagaggatacttcccacaatggagtgaggtcaggctcacttttcagagataagttcattcattccttattttcaagctcctaatcaacagttttcctggtggcctagaatttggagatttcatcctctggattttcagttacctttgtttttgcaaacatttcattcatcctaggggctgtgaaaatgataagctttcataagacttattttaattaaggaagcatttctgcattttcccctatgaagaaaaggaaaactgaccgggcatggtggctcatgcttctaatcccagcactttgggaggccaaggcgggcggatgacttgaggtcaggagttcgagaccacgttggccaacatggtgaaaccctgtctctaccaaaaatattaaaaaaaaaaaaaaaaaaaaacaggccgggcgcagtggctcacgcttgtaatcccagcactttgggaggccgaggcgggcctcctggctaacatggtgaaaccccgtctctattaaaaatacaaaaaatttagctgggtgtggtggcgggtgcctgtagtcccagctacttgggaggctgaggcaggagaatggcgtgaacccgggaggcggagcttgcagtgagccgagatcatgccactgcactctagcctgggcgacagagcgagactccgtctcaaaaaaaaaaaaaaaattagctggttgtggtggtgcacacttgtagtcccagctactcaggaagctgaggcaggagaatcacttgaacctgggaggtggaggttgcagtgagctgagatcatgccactgtactccaacctgggtgacagagtgagactccgtctcaaaaaaaaagaaaaaaaaagaaaaggaaaaccaagcagaattaaaggtggacttacatggttttggggagtttactgacccagagccagagagccaggtttaagggtgtactttgaccctttgacctgagcagctcttgaagaccatgagtgacagggaagaccagagcctgagtcccatcacctgttgtgccctaagtaaaactcttgacctttgtttgcagcccaattttgcccatggcctggcttctctccagataccccatggagcaactgtaaaacgaatgtacatctacagtggcaacagcctgcaggataccaagtaagtataaggagcatgagtttcttgctaaggcctgggctgcctgggagaaagaaccaagcctctgctcattctgtgtctgtccccagggctcccatgatgcctctgagctgtttcctgggcaatgtctatgctgagagtgtagatgttcttcgagatggaactggacctgcaggtttacgacttcgcctacttgctgcaggtcagtgactggctttgaggttggtacattccgcattatacccatgttgagacagtctaaaatcccacgtgcttagggtgtgtctcagtccattcaggctgctataataaaataccataaactgagtggctgctaaacaacaaaaatttatttcttgcagttctggaggctgggaagtccaagatcaaggcactggcagattcagtatctggatgcgcctgcagtctagttcatagaagaaacttctccccgtatcctcatatggtgcaaggggctagttaactccctggagtctgttttttaacggcactgatctcaatcctgaggtctctgcttccataatgtaatcacctcccaaagccctgaccttctaataccatcaccttggtggttaggatttcaacatatgaattttaggggaacaaaagcattcagtccattgccacatagttggtagaagacaaatgatgcagatgtttatggttaaagcttttgtttagttttgtcaagggactggacatagtcttataattagcaaatcttaataagcaacagcactgcttctctcagcatgcacataggcctgctgtgtgcttatatagctttgtgacagttcccaagtgtttcctggagatgcatcctgtgggttgcagtgctactgctctccccttttttgtttttttctttttcttttttttgagacagagtcttactctgttgctgaggctggagtgcagtggcacgatctcagcttactgcaccctctgcctcccaggttcaagtgattctcctgcctcagcctcccaagtagctgggattacaggcacgcattagcacacccggctaatttttgtatttttagtagagacagggtttcaccatgttgttcaggctggtctggaactcctgacctcatgatccgcccacctcggcctcccaaagtgctgggattacaggcgtgagccaccgcacctggccagctctccccttttttctacctttttttgttttgttttgttttgttttgtaagagatggcctcattctgtcatccaggctgtagtgcagtggtgcaatcatagctcactgcagcctcaaaactcctgggctcaagtgatctcacctaagcctcccaagtagctaggaccacaggcatgtgctaccatgcccagttaatttttgtctatgtggagatgggtcttgctgtgttacccagaatgatcttgaactcctgggctcaatcgatcctccctccttggctttccaaagtgctggtattacaggtgcaagccgctacacccagcttttctccctatattatccaggccggtgtgcattggaatactgtggccttgaactcctgggctcaagcaatcctgccttaacctcctgactaggctacaggcacgcaccaccatgcctggctctcctttttctaccctttatgccaagttctcaacgtaggcaagcagacgggacttgttgaattgtggtttggccacaccttggccagagttttgccaaccatgaacaacaacaacaaaaagaaatagttggccgggtgcagtggctcatgcctgtaatcccagcactttgggaggccaaagcgggtggattacctgaggtcaggagttcaagaccagcctgaccaatatgatgaaaccccatctctgctaaaaatacaaaaattagctgggcgtggtaaagcacgcctgtactcccagctactcaggaggctgagacaggagaatcgcttgaactcaggaggcggaggttgcagtgagctgagatagcgccattgcactggagcctgggcaacaagagcgaaactccttctcacagaaaaaaaaaaaaaagagtgccaccttcagtagctggtccctccaggatccatgcctcattttgtgacattcccatgcctggccaacttcagctgctttgggttgtggatcgtgcttaacgggactgggagcttcagcgtggagtttgttcccataaagagagctgagaaccttcgtggagctcattgcctaaccagmatttattcgtaaattgggttcctkcatcagtctctgaggcattgattcctttttttttttttttttttttttttttgcttcttttttctttctttgagacatggtctccctctgtcacccaggctggaatgcagtggcatcatcatagctaagtgcagccttgaactcctgggcacaaggaatccttctgcctcagcctccgaagaaactgggactacaggtgcacaccaccacacccagctaattctatttttttgtagacacgtggtctccctatgttgcccaggctggtctcaaactcctagccttaagcggtcgtcccacctcagcctcccaaatggttcttaattattaagaatctggtatataggctggacacagtggctcacgcctataatcccagcactttgggaggccgaggtgggcggatcacgaggtcaggagattgagaccatcctgactaacggtgaaaccccatctctactaaaaaatagaaaaaattagccaggcatggtggcaggcgcctgtagttccagctactcgggaggctgaggcaggagaatggcgtgaacccaggaggtggagcttgcagtgagccgagatagcgccaccgcgctccagcctgagcgacagagcaagactccttctcaaaaaaaaaaaaaaagaatctggtatatgaactctgagcccacttctgtgaacagttagacagttcacaaccttcacgttacgaatttcttaaaatgtgattttctagccaagacagaacaaccacttaaaggagtgtcatgcttaagctatggttttggggttttttgttgttgttgttttttgacagagtcttgctgtgttgtccaggctagagtgcagtggtgtgatctcagctcactgcaacctctgcctcctgggttaaagcgattctcatgcctcagcctcccaagtatctgggattacagacgtgtgccaccacgccaggctaatttctgtatttttagtagagatggggtttcaccatattgaccaggctggtctcaaactcctgacatcaagtgatccgcccgcctcaacctcccaaagtgctgggattacaggtgtgagccaccgcacccagcctgagctatagtttttgagagaattgagatgtggcagcaaagtcaagtgatttagtgtggttttttcccaagaggatcactgcttgaaacagcagggtggtcaaggatcagggtcattaatcatcccaggagacagcaggaggagcctgtcgagggtgggctctcagccaattatgtctgccaccttgtacagcacattcccagcagtcacactgctcactgcttacactgtcagcagggcaaatgatttgttaagtcagggcctcaaagggttatcgtcttcactgagagtttcctgtggcaagcacaagtttctcaacccactcatttctcatatccttycttatggaatatggctgcagtgatgcttttaatgcagggagtcagttcagccatctggtctccacaataatttgtagaaagatacactttggggaatcacaatctaaaaagtagctgaaactcttagtaattatacctggatatacttcaagcagagggagacagaagacttacctttgaagggtgccttccttacagcccccatctgacatccacacgtatctggtgcctgaagaaatgtgttaggccactggatactttgggcccagagtccagcttgacaggacttttggtgggttctataggtcacccaaggcttgcctaagcctttatttccccctcagtgtatacttgctgagaatagagattcttgggttagttgaactcagtatttagttatttcagatttgggttctctgaagcttctgcatataaaaaatggattgttacacatgagagaactttgacaactgtaaagccttgtgctgagtaagatggtgtcagtgattatcatggcaccaagaattacaatccttctcagattcttggcttcctttttttttttgctgggtggtgggagcaaaaaccttgtctccccctccacaaaatggggaaatttttactgttggtgtatctattactgtgccacaaccacttctacatttgtgtgtttgtgtgtgtgtcattaactgtaatcatttctgaaatgttttattagaaaaagtcagagcttaaagattcttcccaaagaataaacttttggcaaatcagaaggtcttttattcctccacttagctggtttgtcccttttgagtgataatggctcttgtctgggttggagggctctgtcaggtgtttgtgtagaattagggagacaagtaatgcatgcttcactctacttgttgatagagcagttttacaggttcagtgtctctggttaggggttaccattgagagtacttttgtagtttttttttaagacagtgtctcactctgtcacccaggctggaatgcagtggtgtgatcttagctcactgcagtctctgcctcctgggctcaagtgatcctcccaccttagcctcccaagtagctaggactgcaggagtgtgccaccacgcctggctaatttttatattatattttgtagagccagggtttcaccatgttgcccaggctggtcttgaacgcctgagctcaagcagttcaccccgcttggcctcccaaagtgctgggatcataggcaagagccaccacacccggccmagaagtacctcttaacataaatccttgcatcttaccatagttgtgtgatgatctgattaaggtcttctccagcacacataagctccagtgatggagcttatggagaaaaaacagcactgcctttttttttttttttttttttttttgagactgtctcagtctgtcacccaggctagagtgcagtggtgtgatcttggctcactgcaacctctgcctcctgggctcaagtgatcctcccacctcacccttccaagtagatgggactacagacacccaccaccatgcccagctaatttttgtatgtttttgtagagacggagtatcaccatgttgcccaggctggtgtcaaactctgagctcaaacaacccatccgccttggcctcccaaagtgctgggattataggcgtgagccaccacgtctggccagaaactgcactgtttttgttcacttttgtttcttcaacatctagcacaatgtcctagcccatggtaggcaataaagtagtgaatgaataagtgaatgaagtatccagagcttcatgtcacatgtgggggattgaataagtccctggcattattttgaatagcgatctcttgtacagtcttaagccctggtgacctgatgtttctgattgcatgcagtcttgccccttgccagacctaataatgtagcatgcagccagtagcttctctggggcccccagagagggtctctggtcctaaccataacctgacaacctctctgtcttgttttttgcaggttgtggacctggcctattagcagatgccaagatgcgggtatttgaacgttcagtgtattttggtgattcctgccaagatgttcttagcatgcttggctctccacacaaagtcttctataaatcagaagacaaggtaggggaattatgttgcagtctcctccttttttttaatcaacactaatttaatattgagtataaactgtttgctattttcccatagaacttgttctaagtaaagctaatggtaaagtaaattgaaaactgtyttctaacccctgtagtccaattaccctgactctgtccctctccatagtgcctacctttycttagagaccaagacagtccctagtcaacgacagctggccccctctcctcctagattggtcagcaccagcagctgagactccccactcttgcttgttccgcagcttaatgttacacatggaacacaatttgtagactttcagttaatccrgaactatattagagggatggattttaatttatggttattttttccctacagatgaaaattcattctccttcccctcataaacaagttccatcgaagtgtaatgactacttttttaactacttcactcttggagtggtaagttgtgattcctcagagaagcccttcatttctattggggtgggcagtgcatctttgcagatctgtgtgtccacatgcagctggaaccatgcctggacattggggaacctagccccagctgtctttgcccagggttgttttgcataggctctggtactccaaagtagaccttgcctgcaaccaggattgctcaggaacactaggttccctggtacctgttgacttcttttctgagggaaacatgttccacagatggaggccttggaaatcattcagattaagctgtttggagagctgcccttttgtaaagcataggaccctcttcttgagtcacaaaatggagactgaaaaggattggagacagtggggtgtgcttgtatatttttagaggaccaccccagaggcattgctgtatccctgtgctatggacccagggagctggatatagctggtagctggccagtgcggacagtccagctggtgggtgagttgcatacatgagaaattattgtataaacagtgtttcagcaggaaacatctcaagagggcagggctggcctggaccatgggtcttgtaacctttgagccttctacggtctgaggtcctgaggtagcaaacagtagatttcacagagggagtgaggagagactgagtctgcctaagtgggaaagaccaaacacaggagccaagagtagtaggggagctgatgtccggtcatgaactcctgagagtaggatggcggcaggagggaacagtgctgttgcagctggacctctggttcaagggccagtgatgatagtatctcaagaaacttagggtgttgcttttccagctggaaactactttggccggtggcacctttgccccaatttttgcttgctcccgctgggctcattcagctcactcagcctggcaggctgcgcttagctcatgctaccagcctggatcccatgcctgccaagggcaagccaggcatggagtggcaaggggtgtgtgagcgagtgaatgtggcatccggccactgtgcccagccaggcatgctgactgctgtggtggggcaggcagctccaggcgccagcataggcaccagctccacgtaagggtgaggctagatcacgtgtaccgcaagcggcttccattgcgggcacccatgtctggacaaggagaatgcggtggcacccggaagcttggggacaccaagaaccacacagagccccaaacagggtgtcacagctctggctcggggagctcctaggtctgggcttcctgaagggctgcagctcttctcttcttgtcacccacaatgtggaaagcggggcagggcatttcagccttatttgtgttacacctctttcagtcccaccattcggtgggtcccgagttcttgtcctgcggccaggaagaatgaggtatgcagacagctggagggtgagcaaaaaggagaggagctttattgggcaacagaacagttcagaggagacccatggtgggtagctctttctgcaggcaggtcatcctgacgagtatccagctctcagcagagagaagacccatagtgggtagcttctttctgtaggcaggtcatcctgaggagtcaaggagtcctgaagtgggtagcttcttcccacagttggtagtattgacatctgtccaagtctggctgaatccagggtttttatgggctcagaagggaggaagtgcatgctgattggtccatgagcaggcccggaaaaagcaccataaattctcactccacccacagactacccagagctggcagcccggcccccaggcctcaggccatcccaggcttgaaggtggggtttcacctcagaccaagccctttctgcccaggagcccttctgcttcctaccaccatcagcgtgccatccatggtgcccatgctgttcatgccgaggcggcagggggctagtgtgtcagtgctgccctgagtgcgtgcactcccaaccaggtcgtgacagcgcctgggctcagccacaactttgcccctccccagagcaggcaccgggagtggggagaggctaggtagtgggagcaggcactttcaagcctgccggggcaaggggccttctgggcccctgagagtgcagggatgccagggtctggagctgcagctgggaggctgcagctacacccaggagcatgggctcctgccctgccaacttagtagaggccagggctctcacctgttcccagttcccataggctctgcatagttctatgggaaaacagaggtcccggccacacttcctctgctccagtcggcatccttgcagcggccactccagatgggccattgctgccatcaataggtgacagggaagatggagagaatggactggcctcagtaggacttagttggctgtgggtacaggggtagagtcagaggttaccctgaggtcacgggcccaagcagctggatggatatgaagctggaaagggtaggggataggagggaagtgttcactgggtggcatcaaatccaggtccaagtcctagagagaggtcaggctggaacttcagttcctggggttgctgactcccacagagggtgtaatggaagccaggagggtctgatggattgtggaattcagaatagtcaagtggccttcagcccctcaagaaccaggtgacttggccagcatggtggctcacgcctgtaatcccagcactttgggaggccaaggtgggtggatcacctgaggtcaggagttcgagaccaacctgaccaatatggtgaaacccccatctccactaaaattacaaaaattagccgggcgtggtggtgtgcacctgtattctcaactcaaggaatcctcctgccttggcctcccaaagtcctgagtctgcatcctcggattctcttggctctgctgcttaccatctgggcaccacgctaggtgacttactgcacctcctggggccttggtttcctcatctgtaaagaggaacctgccttgaaagtttgtaaagcacctttattcagtaaatctttattgagtacctactgtgtgccaggcactactctaggagttcgggatacagcagtgaagaacacagacggacaaccctgccctcacggagcttatattcagagggaagaaagccacttagcaggacaaagagctaaaatggatagtacagtgtgttgagaggtaacacacatgacagaaaagataaggtatggggccaggcacggtggctcacacctgtaatgccagcactttgggaggccgaggtgggcggatcacctgaggtcaggagtttgagaccaggctggccaacatggtgaaaccccgtctctactaaaaataaaaataaattaaaaaaaaaacagccaggcgtggtggtgggcgcctgtaatcccagctactcgggaggctgaggcaggagaattgcttgaacccaggagacagaggttacagtgagctgacacagtgccactgcactccagcctccatgacagagtgagactccatctcaaaaaagaagaaagaaaatgtctaaaagctgcttggcctgtcccctggactgttgtctggaagaaaggtgatgcctgcaggcattcttgctgtggagtgcactggatgtcccaagttggacatgcctttggaaaggcctctgccctgcctcagtaacattccctccttgagtacccttgttttctatcccaggacatcctctttgatgcgaatacacacaaagtgaagaagtttgttctacacaccaattaccctgggcattataatttcaacatgtgagtacacctgtctgtacctcccctctgtgaagtgagttttgggctgaaaaccccaggaaagagcttttggctttgggtgttcactaatttatctacacctgaattcttgctgtttcatgggaagtgaatttcctgagtgcttgctgtgttcctggcacagggtccaatgccttacatctctctgtttgaacccattttacaaatagggaaataagttcagaaagcttgatgtcttatccaaggtaataggctctccagaacccagggccargatcttttctgttcgacttccgtgcctaaatctggcctcccccagtgaacactgtcaggcactcagagccagggctttgggcaggtgtgtttggttctgtttctcctggggtgtggggttggaatatgggagtggccaggccttctaggaggcccagcctttacccatttgccttctctctagttatcatcgctgtgagttcaagatcccactagccataaagaaaggtgagtagtgaaagctctcagggtaagggaggggttttagagtctgttttccactatgaaaagggagaaagatcgaagcagtggttggatgtgtggagcttctgcccatggcctcagttcctctggggtgggctcattgttctgggggctgcagtgttcttggtctgagtctcctagaggcccttgaggcctyttcctatgactgtgggattgccggcctctggaggggagagtttcttatctacagatgatcatccagggggccccagcccatccttgttgcctgccacccactgccaattgttgttgctcacacctgactgacctcccttcacccctccatcctcttccaccctggaactccaaaacagcctgttaatcctccccatgtactccaaccccagtgcaaagggacaccaggtctggttcctacctagggctggggccacaggtaggctgggccagctacaaatctgccccactgtcttctcttttcagaaaacgcagatggtcagacagaaacatgcacgacctacagcaaggtgagcacctatcttcctacctggcatagcctgagaatgaggtggacatgagcctgcaggcagtatggggctgtgtcctcyaggccagccattggtcacagacatgttcatgtccctactaacccctgctcccctctatccctcttgcagtgggacaacatccaggagctcctgggccaccctgtggagaagcctgttgtcctgcacaggtgagtgggagtttgatgtccccggccaccccacctgactcctcagagcccagaaagcccagggaagcctggcacagtggatgttgcttaaaaattacagaagtttctgatattgccacaagcatacttcctgccccactctgcacattaggactgagtcaactgttctgtgtgttcatctttgatagagagaatgtccccaggggtagctcccctctcccaagcctacctctaggtatgggggccttctcaycctcagttattcaataaggaaggagggcttggctggctggcctgggctctttttccctttgagctttgagctgctgcctgctgaagtccacagccccgttcctggttgccatgctgcctgagattctctcactcaagagggccctcttgactcctcgccaccctagtccagttccacagtaacttttttgtcctgttgggctctgtatgtataattctgagttgagtgagaccatccctacccctaggatcttgcaggcctgtgtgggaaacagacagacactcacagccatgagagactactggccagtatcccataccccagaaaasactggatcccttgctttaaggccgtggcctctgtctgcctctctaattctgaattctytggyctcaggtcttcctccccaaacamcaccaacccatttggttccacattctgctttggtcttcagcgaatgatctttgaggtaagctgtggaagccctagaaataaactgcctggggggttgctggtcatggcagggccaggtgaatgatggagggaaattggggagggcatcactgccatagtgggcagattcatccttcttcagcaaccgtgtctgctgcatacctggcctccccacacttaacaatgaaggttcagaaatgatgttgagaaatctggggtcacagaggccgaagcagtggtctgtgtccaacaagatgggaggtaacggatcccaagtttctatctgacaacatgattatagcagggaagggaaccacagggcaagtggggcccagcagagggtgttgggggccctccagtggcatgtgaacaaatgcattgtaggggagtgagtggctctggaggccctgctgacttgggagaacagcaagctgcccttgttttccctgtggatgcagtatctccagcagacacttaacagttccagaaggactggacacgtggccatggtaaaggctrtgtgtaaccattgagaaacaggcagatctcaggcagaggggggcctttagcatgaaccaggggaggttgaggagtcgggaaacccagccattaggtgcaggtatgtcacacaacctccagccctcatgcacaggatctgcctacatccctttacctctcccccttgacccactgtcctcttctcacaccaggtcatgcagaacaaccacattgcctcggtgaccctgtatggcccccccaggcctggtagccacctgagaacagcggaactcccctagggacaccaccacccatgcccctctgtcccgtggaactgtgcatcacatcctgctcagtgggcctctgtaccaccctgtgggttttcttggacacctggccagtgctgaagggctgttgtgatgttctgaggttgggctcaggctgggtgctctgccatgggctgagtggcccagatattcttctgtccatctttggcctgctggtgccagcaggggacacagactgcaaagagaagcacaaagtttgagccttgattcctggacccaggagctctcaactaacaaggaggcaggagaggtcaacccttgtcccatgcacattgggaagacttggggctctttctgtgactgaggacacaggcacccaggataaggacaaggtcctgcctttggctccacattgccacatgacccttaaggcaagcaggtagcgtgtccatagtacttggttgcgacatttgcactacatccactttagttacttgatgagctggctgtggccagggtggcccacctgcccttccctgttcctttcttgcacgcgctccctgcctgggcacaccaaactggttgaaacacagctttctaccatccaggtacatgcccaggcctggttctcacccctgttggagtcagctttcaagattgcctgtgcccctgctctgccccatcctggctggcagggctgcatgtttccatcctgtttgcctcttttatttaatgccaaagttttagccaaagacatcttcctacttttgttgtgtttcagcattctgttctgcactgtgggctggctctctgccccaaccctgggcactggcccctggctgggccatttcatggctcaaagcctctgggggctcaaggaaggctgggctgctcagtcccttcatgggtcttgctaatggaaagtagcatatatgtgctttaaaaatattaatccttttgaaaagaactgagaagaraaatgtataattttatcccatttttaatattttggtctagcaacttgtgatacatagatgacaattttgtgagtttttcaaatgtgtgtacagatttttgtaaatatgactcttttgtaattaactcatgtacagcctcatcctgtatagtttaatgatgaatgtgcaggggacctgtctcaggctcctatatggttcctgggccttatagccaggtttgtgtggcgctcccgacttttgtgactgactggtgtcttcccatttggactgtggcctggccagagccccttgcatatccccactgtcaggggcagccaggactgttcccatcctcctggaatgggggaaccttccttatcccctgcccacatcccctctccaataaagcacctgtgccctcagcaatggcctgccatgtgctgttgctgggatgtttgtattaaggtaagtgtgggtattggttttttgagcaagggggtggttgaagcatatggggaaattaatagtggtggcatctcaggggaagacattccttggctcctctgaggggatacagcctccagtgggagactggcattgttgtgtgagttcaggaggtgaggaaagactaggtaggaccgtgcactcatttgtcccttatgtgtggctccatccctggtgctcagccacacctgggcccaggagaggttgtgggaagcataatatctgttttcagatgagctatggcaaagtgcctgccaggttcatgaattcaggctgtggcggccggagcccctccacctccctgtggggcctggccttgagagcctctgcatacgtccgcgtcagcctagggggttccaaatccagcagagtggtaggattccctaagtccctgccaccacaccagaacacacctctgtgctactaggaggaccagacatatccactgctctgggacctgttggacaagagatggtcatctaccacccagccttggctcgctcaaagggtcaccattacacgggtttcaactggttccagcagggtggaccgccaggagccaagcttaacccccatcccctgggatcctgtggagacaggcacctggtgatcagggaagaaccacatacacggcaataatctgggaaaccggctccattctgggtctgagttaggagcttggggctgtagtggggagctaggagtcccattggaaggggcctgcagcgacaggctgtggatgcgcacaggctggcccatgcggcccgtgcagcaggcgccacataagccagatgtcagcggccgagagcccgtgcactacaaccagctcacggtaaaagcaggggtcgaaggtgctcaaatgcggcgcggctgaaggctgggggatgccaaaggtgcggaaggcagggtgaggctcgggcgtgagccgcaggcgctgcagacacatgcccagaaagacgtcgtcgatggggaagagctcgacctgcgcacaggcgccagccaggcggtgcagcgtggccccggaaagcacaaagccaccgccgcccgcgtaggccggataggcgggcaggccgtacacggcctcggggatgtagtacttgctagcccgcgtgcggatgggccgcgcatgcacaattacgtcaccagcaagcaggtcttgcgccgggtcccgcggcgccaggaactccaggagatttcccacgttcacgaacacatctgcgtcgcccttaaaaacgaagcgcacgtcggggcagaaagctgaggcccaggctagaaagtggatctccttgagcgttaggttaaaaaaggtgtcgtcgaaggcccagagcaggatgtccgcatacgcaaggctctcggcccgcagcagggcgcgccagtgggttcgcgcgccctccccaacttcgtcggccccgcccgagcctgcgcccctgggcacgcccagcaagaacacgcggcgcaccagcgccccctgcacgcgaccctccgcgccccacgtctggcgcacggcttggcgccgctcgaagtcctctgccaccgacttgacagcaataagcaggtccgggcggccaccgggtgcgccgtcgccgcggcacttgtgcggctggttaatgagcagtggaaaccgccgctggtccttggcgcgcaaatagcgggcgaagtcaaagggtcccgtaggcgtgggcggcgccggtgtgtccccttcgtaggccggcggggctgcacccgcgtcgggtaactggaacgcgcggggtccgggggtgggcctcggtgccgccctccctcgccctcgcggcgcgctcgccgtcggggccgcgccgtcgcgctgcgcatagagtaagaggcccagggaggcgccaaggagcagcgtgagcaatgcgtccctgcgtaggcgcagcctcctcctcatctccgcgcggcctgcgccctccctcccctgtaagggtcgcagtcggcagcagggggcagcgagccccgccctccccagctgagggggcgggaggccacgccccggggggggctccagcgaccgacggttgagccccttgcgttgttctcctcctcccggccgtgtcgcaccgccgggaccggcagcctgaagggacaagaagttcacccatgtagccaactcccccgcggcctcagctccggcccaggactgcgacccagggccgggcagggagactgggagcctcggcccctcccccgcccgcctccctcgcgctgaggccgaatcccttccaccctgccatcccctcaatgtcgggccctggggtcccgacactcacgctcggccctcggaagtggcgcagccccggacgccctggcctccggggctcagcgcagggtccgaggggccgccatggaccgggcccgagccaaatgcagcgttggcaggaagggggaccggtgccgtgccacgtgaccctccagctgtgcgcgcccagacttctggagctcagctccgccccggcgccaggagcactccggcctcagagtggggactaatccctgagagggagcctcctcactctcagtccctctgggaagggctggtctgggtgctcacaccccaaattcgcctttctggggattgggaagaagcatcaactcccctggttagctcccccaactatccactccccactcccgcgtctctggagtggggcggagcctgggctgctaggagcccctgagcaggccggttccaaatgcgcatgaacctggccaccatcccgggcgggcctctcctcagcagccctgattccatcaggcagggtgcatacgctgcccccgagacacatggctgtcttcttactcctggttctgccatgctccccacccccagtaaacacacgcacgggacaaacaaggcagcccacccaatcctcagggcaactctgccagcagctctcattcatgcccagatggggacactggggggctcttcggggagttaagtgacttgcccaggatccaaaggccagaaagctctgcccccaggtcttctgaaattcaggccaggattattttatctgtccttgccccgctcattcatccactgggatacagaacagggggccaacccagtctgctttaatttcacaggcaagcacttcagcctgtctccccgggggctaatggacctgagcccaagccaggtgcagttctgagtcccctggtccccagcatagcctactgcaggtagaaatgatcaggcctgtgcagctgcaggtcagacagggctggcaaggatggggacagcttgggaagactcctggcggaggccttggctaaaggattgctctgggatgcaggtggacagaggtgctctgcaatggagagctaagtccttgcgcagctcagctgccagctctctctttcttggtcccagcccatgtggtggagcctggaatagacagcctctactggtctcttaagaacccagccccatcctctgtccaagggctatatctgctcctgacggcttcttcccaccaatgttcaatcttaaaaagccacctctctggctgggtgtggtggcttatgcctgtaacctcaacactttgggaggctgaggtgagtggatcacttgaggtcaggaagtcaagaccagcctggccaacgtggtgaaacccccatctctactaaaaatacaaaaattagctagacatggtggtgggcacctgtaatcccagctacttagagggctgaggcaggagaattgcttgaacctggaaggtggaggttgcagtgagccaagaacacaccactgcactccatcctgggcaacagagcgagactgtctcaaaaaaaaaaaaaggccagtcgtggtggcttactcctgtaatcccaacactttgggaggccaaggcaggtggatcacttgaggccaggagtttgagaccagcctggccaacatggagaaaccctgtctctattaaaaatacaaaaattagccaggtatggtggcacgtgcctgtaatcccaggtacttgggaggctgaggcaggaaaatcacttgaacccgggagacgaaggctgcaatgagccgagatcgtgccactgcactccaacctggcaacagagtgagactctctccaaaaaaaaaaaaaaaaaaaaaagccaaatctccaccctgagccttactctttttggtcacaaagtaatcaggagtcctctgctccagctttctccgcggcctcaccttccattccctcctgtgataaagcttcgggctgcctccaccatgactcagaaagacccctgactggtaagctccttttaactgagtccaacagacactcctcggtcttgactacccgctccattatagtgggtgggtaatcccctggtttccaaatctcctggttttcctccttcctctttggctgttcccattctggttggtgtccttcaggacatcccctggggccaccccacccactccccacctgtctattcatcaatctttagattgaaccctcatcctgaactcagaactacagacccaactaccctcatactctctccccggatgcactgcaggaacatcatgctcaacttgtcccaaacagagcaagcatttcatttccccccagggccccatcccagcaagcagtcccacccaccatccaactggcaaaggcagaaacttggggccctctctcagccattcctcacccagtgtcaccaggcctgttactcttccacccacacagctctttggtggtcatccccttccctccatctctgctgctactgccccagcctggggccaccatttcccccacccccatcctcatcaacctcccagtcttggccaggtgcggtggcacatgcctgtaatcccagcactttgggagaccaaggtgggtggatcacctgaggtcaggagtttgagaccagcctgaccaacatggagaaaccccatctctactaaaaatacaaaattagctgggcatggtggtgggcgcctgtaatcccagctacttgggaggctgaaacaggagaattgcttgaacccaggaggtggaggttgcagtgagccaaaaacgtgccattacactacagcctgggaaataagagtgaagctccatctgaaaaaaaattaaaattaaaaaaaaaaaaaaaacaaccacctcccagtcttaactcccgaaactcttcaaaggcttcctactggcctcattgaaaaacccacaagccttcctcaagcccttgcctgagactgtgccccgaacactgcccttctctcgatagcccacccctatgcctactcacactcatctcctccaggaagcctaccccctgtcccctgcccaggttaggccccttcctccatcctccacaacttctctttttttttctttctttttttttttttttttttgagacagggtctcactctgtcacccaggctggagtgcagtagctcagtgacatctcactgcagcctcaaccttccatgctccagggatcctcccacctcagcctcctaagtggctgggactacccaggctggtctcaaactcctgagctcaagcaatcctcctatctctgtctcccaaattgttgggattacaggtgtaagccactactacttgtatttctcacatcaaaatccgtgttatactttattatcattgcttaacattcggggtcccacgctgagtgtgagctgggggcaggcaagattgattcctgttttacttcactgcagtatctgcagcacccaggatgaagtccaggacaccaaagatcaaggtgcttcatgagtgaaactgtaagggctggctgtaagccccgcttctgggatgggagaaggtgaggctgatctccaaagcaggtcccccccaccccacactctatcaaagtacctgaggcagaatccccaatgatgcacccccagtggtctggctcctggggaaggcaatcaactctgccccagcaggtccagcagataggccaagtggagtttcagggtcccgtggatggacaggggttcagcaatagccgcagaaggaaccctaaggccatccaggttctccaaaagctggctgcacccctggtctaggccaggccgccattgggatcggtcaggcccagcaagtcctctgccaggctggtgagctcgttctcctcgagtgcctccaccaggcgctgcagcgtggcgcggcggccctcggcctgca

SEQ ID NO: 95445 - DNA, 13054 bp, Homo sapiens
atagttacctggtgcttactctgggaagaatgtaagtactgtaaatcttataaacctgtttaacctcacacaatcccaaatgtcaatttctatgatcttccaacattgtctctggaaatgggggagtggacgtgataagactttgaccaagaacagaagatttgaagtaccattctttaagaaatggtccttgagatttttttaaaaatccaagtcacagatttttctggctcattgtctgcccggggcacagagagggcatagtggtggtgtcgctgctggtgggagtcactggggaggggtgcaaatggaatgcagagttgttagaaaaaaatctactctaggaccctgttgccaattgggcactacaagcacagtgattagacccagagcctgtggcatcccaaaggactgtaagcatggaaatacatacacttgaaaataaaaagaatgagaagtaagctagaaacatcaactattaattagaagctgtaattattaatgtcaaaagataaatctttacaaatcatttcagaatatacaataaatcgtgtcttggtaatggaaccaagtagcttgtggacaaaaatgtgggactttttgtgtacagtaagtcctcccttaacattgtagatggttcttggaaactgtgactttaagcaaaatgatgcataacaggttctcgaatattgtcattttgttcaacctatttcattataacattgatgagaaaaaaaactggtttcattttttgttattttgcttaaagtcacaatttccaagaacctatcaacaatatcaagtgaggactttatacatttttgaatcttttgagtttggaatcatgtattgggttggtgcaaaagtaaaagtaatggtgaaaactgcaattacttttacaccaacctaaaaatctatatatttaaaattacaataaaattaagaaaaactttaaaaaatcttttctgcccgttattttactaccccccactcaaaattaatgtgtgatgtgatatggggtggggcctccaaaagtgactgtcaatttcagaataaaaggtttaaaacagggctgttactgtctctatttttgagggaagtcccacacaaatttgatgcaataaatcgaaaagaaaaaataacttaaaaagaaatttaaataactttaaaaagaaggaaaattggcaaagattgtccaagagttctcccctataatagcactgggtatagactttcttataactgagtttttagccaaccttttaaatgggtcattcctatgctactatagttatactgttcttgctcatggaaaaaggtgtaagttctccaattcattttataagataactctgacacaaaaacctgatgaagacagcataagaaaagaaacatacctgccaatttcctcttttctttgaacagtggaatttttttttcatagctcccttgtgctaatatattcttacccctattggggatagaactcaggtggttccattagagagcctgtgtgttcctgtctgaattttttatggatggaaatttaggtgcagattggaaaaaagaacaaagaggagggaagaagcagattatcagccctaaagattggactttcttttatttactattgttataaggtggaaccccatggaagtcttctctgtaacacatgcatgcacacataccataccccatgcaaaacccacatctctatttgttttacacattttcacccagtgcaaatctctatagtggtcttcagtattgtgcccattgctgctggtccacaaatgtttcacgtgttacatttcccaccagcaacacagccaactcttgttctgaagctcttacccttcacgctggggctttctcccatttgctttccaggtatgctattctttctcagtaattcatctcaggtcgttctttaatggtttccattaatctggtccattttgtctattctgtcaggaacccattgctgatttctaatttgtagactctgtttatacactttgttggacattttattgggaattttggggtaaggacagcccttgccaccgttttgtctgaaagtacctttacagtatttaattaaataatatacctctaccttttactaaaattggctctcaagttctttgtgtaagagtccctctctttatgaaatgagaaaatggaggcacttatttatgtttgcaagtactttttattgtgaaagcaatttgttggttttcctttgagtggaatttccttcctatagaattggagataaagaaaaatgtatttcctccatttctccctcatgtgacttatgttatactcttaatgcttacttttgtctttcttttgcattccattcagaataattaactgtcaccatacaattcttcttgctcctgtataaagaattagcaatggctcccatgcatttttgaaattctatttcttatcttttataccatattactctctcataaccaattctagctgcaagtctattatgaattattttatggccaatttattcttttctttccaaagactaagtatgattttttttctgttaaagctacgtgactggcattccaatttataattttcccaagaattcctttaatgtccaaagcatctgataaaatatatgtgggatcacaagcttccatttgctccagtacattttcaattatagatagtgaagtgcttagaccttctgagctcccagaacatatataatctcccataactactgcaaatttccatctgcttctatcatcactcaaactggggggtctcaggtggatcaatgtgtgagatagtccatgtgggattttaaactgtgtttgttagaattacagattgatgcctgtcatcattgccccttgaacacattcacaaagaataaaagatctagtagcctggtttattttctcttccaccccgacacaactactggagaggaaacatcactgtgaggtagaaatgttacaaactcagtgaacagatctggatttgagtacaactttattatttatctggctttggacaagctgtttctgagtctcagtaaaatgggattgatattagaagttattatagtccagaaccaggactattctgaggattgacaaggtaataaaggagctaatacattttgaaatagagtgaagtgttacatgctctgactggtgtcgaagtttacatagcaaagatctataggcccagattttaaaggacaagatgagggctaccatttctccctcccccaccaacttcccactcccatcaatccttgtcactttcccctgtcagcaattccctggctcatgctttaagattggtctctcttgaagcagaaaatactttaatgtgcctagactgaggcaagggatggtctcaccctcagtactgctctgcttcaaccatgttaattttagaatggaggagttcaataggcaattaaatatagaaacaaggagataagtcagattaaaaattaactgtgaggacttgaaccaaggaaatactcccaaatagagaataagcctttttgcagtaatatgcttattacagtattctttacaaaaggacaacaacaatcccagcactttgggaggccgaggcaggcagatcacgaggtcaggagaccgagaccatcctggctaacacagtgaaaccccgtctctactaaaaatgcaaaaaaaaattagccgggcgtggtggcgggcacctgtagtcccagctactcgggaggctgaggcaggagaatggcctgaacccgggaggcggagcttgcagtgagcccagatcgcgccactgcactccagcctgggcgacagagcgagactccatctcaaaaaaaaaaaaaaaaaaaaaaaaaaaaaaaaaaaaaagaaaatagtgcatcacacaaaggaattttttttcagaataaaattttgtcccctgattatgtgggaagttgcaggcctgcagcacctgggsagatagcaaaatgttaataaggtgatttttaatgaggtgcttgggaaaggaagggcatactcttgccatgcacaaatttctacttcacactttaagaagggtacaattaaacaacagcaataataatagtttacttttattgagggttttctcggtgccaggccttgtgcttagaactttacatgcaatggtggttaagtgtaggctttcttcagctagaaatatgccttcctaagggatgaattagtaaatgtttctcttcagaggtggactaaggtatattaattatggaaaatagcactacatagtgaatatatgtatatatatatttgacataatatatttatatgtaattggggactaggaggcatatacatttctcaggaaagtgctaaggaatagcaaacagcttctccaggaacatttgactactcttcttagccagttatgctctgaggagtgaataaaagatgctggaaagaaagtataaattatacagattcaatccatttgtagcaataaacataatggctctggcaatattatgtgcaaattccatgaaaatgtaaattattatgaattagaaatgaactagaaatcgatgaagaattaggctaagaagcttcctttttgtttttgtgggttattttccttttgagataaggatagtgtttccccaaagtatcatggcttacctctattccttgtttgtatttgcagcatatagcgttaataaatacccacttgtacatggggactatataagcaagatatgactccttctcacaccagtgttaatggcttctcacttttctatcattctagatttaacagtgaagaatctcctcaaatttcaacaagtgactttatcctcatagtttccttgcgttttccagagtatgattcctttacacaaactacagccttttatattctctatggacctgttgctgcattctttccttgggtgaatatcttcttaatcatcctccgggtttggtctaagcagggagaccaaattagaccccaggagtgtgaaactggcatattcacaattcttgtttcttactgtgattcctttaagtcatccctttagagtctggatgtaagtaaatctataatcctaggtaaaccatactagtgagagaagagctacttgtcaagaaatgggggcatattcattttaattataatgtataattattttcttaattatttttataataacttcaatgacactgtatttatattaatagctctgtagatttttaaaaataatttcaacttttattttagatttgagaggtacatgtacagatttgctacatggacatattgcatgatgctgaggtttggggtacacatgatcctgtcacccaggtagtgagcacagtacccaatagagagtttttcagccattgcccctctttcctcccgctatcctctagaaatcctcagtgtgtattgttcccatctttatgtctatgtgccaatgtttagctcccacttacaagtgagaacaaatggcatttggttttctgtttctctgttaatttgtttaagataatggcctccagctgcattgatgttgctgcaaaagacattattttgttctttttatggctgtgtagtattctatggtatatgtgtaccacgttatccttttccagtccactgttgatgggtacccaggtaaatttcatgtctttgctattgtgaatagtgctgtgatgaacatacgagtacatgtatctttttgatagaacaatttattttcctttccgtatatacccagtaatgggattgctaggttaaatggtagtgctgttttaagttctttgggaaatctctaaactttgagaatcaccaatttccacatggctgaaccgatttatattcccaccaacagtgtataagttttcgcttctctccacagccttgctggcatatgttattttttgattgttaatagcagccattctggctctctgcttctcccattcaacagacagctacatcttgtgtagtgccagccacatccctgagatgctatggagaaagtgaagggtggagtaaatgagtttggctgtattagacaccaggtctctagggctgcttttaactctggcaaagtagattttgtcatgatcaatgactacttcattgacctcaaccacatggtatttacatgttctaatatgattccacccatgacgagttccacagcaccatcaaggctgagaatgcgaagcttgtcatcaatggaaatcccattaccatcttccagtagtgagatcccaccaaaatcaaactgggtgatgccaatagtgattatgttgtagagtctacccattatcttcactaccatggagaaggctggagctcacttagaggggagaatcaaaacagtcatcatctctggcccttctgctgatgcccccatatttgtgatgggcatgaaccataagaaatacaaaaacagcctcaagattgtcagcaatgcctcctacrctaccaactgcttagcctccctggccaaggtcatccatgacaactttggcattatggagggactcatgaccacagtccatggccttcactgccacactgccacacccagaagactatggatggaccctctgggaaactggcgtgatggccttgggggtctccagaacatcatccctgcatctagtggccctgccaaggctgtgcaaagtcatccctgagcagaatgggaatctcactggcatggccttccatgtccctatcaccaatgtgtcagtcatggatctgacttgctgtctggagaaagctttcaaatatgattacatcaagaaggtgaagcaggcatcagagggccccctcaagagcatcctgggctacacttagcaccaggttgtcttcttcaactttaacaatgacacccactcttccatcttccatgctggggccagcatcgcctttgaaaaccactataccaagctcatttcctggtatgaccatgattttggctatagcaacagggtggtgaaactcatggcctacatgacctccaaggaataagaacctccaggccaccagccccagaaagatctccagaggaagagagaggccctcagtcccgcaccacactgagactctcccttgccacagtttccatgtcataccttctaaagagagaggggcccagggaatcatactgtgttgtgtaccatcaataaagtcccctgttctgaaaaaaagtagccattttgacttatgtgagattggttttgatttgcatttctctgattagtgatattgagcattttttcctatgttgaccacttatatgtcttcttttgagaagtgccttttcatgtcctttgcccactttttaatgggattatttgttttttgcttgttgaattgtttgagttcctcatagactctgaaaattggacttttattgggtgtatagtttgtgaatattttctccctttctgtaggttgtgtgtttactcttttttttatatatatagtttcttttgccgtgcagaagctctttagtttaattaggtcctacttgtcaatttttgtttttgttgcaatcatttttgaggactcagtcataaattcttcttctaggccaatgtccagaacggtatttcctaggttttcttgtaagatttttatagttttacatctcacatgtaaatcttaaatacatcttgagttaatttttatatatggtaaaaggtggggatccattttcttctgcatatggctagcgagttaacccagcaccatttattgaatagtaagtcctttccccaatgcttatttttgtcaactttgtcaaggatcagatgggtataagtgaacaactttatttctgggttctctgttctcttccattggtctatgtatctgtttctgtaccagtatcatgctgttttggttactgaagccttatagtatagtttgaagttgggtaatgtgatggctgtggatttcttccttttgcttaggattgctttggctattcaggctcttttttgagtctatatgaaattgagaatagttttgttccctaattctgtgaagaatgatgttggtagtttgataagaattgcattgattctgtagattgctttgagcagtattgccactttaatgatcttgagtcttctgattgatgaacatggagtgtttttccatttatttgtgtcatcaataattcctttcagcagtgttttgtagttctccttgttgagatcttccacctccttggttagatgtcgtcctaggtattttatttttttgtggctattgtaaatgagttgtgttcttgatttgcctcttagcttgaacttcattggtgtatagaaatgttactgagttttgtacattgattttgtatcctgaaacgttactgaagtatttatcagttctaggaaacttttggtggtataattccatagattttacaaaataatgtgtatgtatatgatctcatttaatctttgcaaccacatgaattaggtattgttatattcgatttgccagtaagaaaatttatgttcagaaaggtggataatttatttgtgatcatagaaccagtaagaagcagaactagaagtagaacctgggttttatgcctccaaatcatgtgcttttcccaaagatcactctggctgtttgcaaaaggctttaaagtagatctatggattttgtataggacatttcaaatagggtaataaaataataaatcagtaatttcagtacatattgacaaagtgaacaaaagtgagtttgattaatagtgtgtgaggttagttatttttcttataggtccctaagggaacatctattaataggctttggaaacagaaaataactagcctacagatttaagacaacatgcaaagatttaaccttacagactgagtgtttattagaaacttatggttggcttctttgaatgcaactgatgggtgtactacagagctaacaaacaggagttatctttgacctccactccaccacatgtttgtatttattgaacatttactatacaccagaccctgtgttagctgttgggaatatgtccatgagcaggactggtctctctgcttctgaccttctcatttcctcatccagcacattctctacagagatgaagagtgatctttctaaagtgcaaatctgaccatgtccagtcaatgtcaccaggctgtaggttttcacagacaagagatcacagctgtctgagttaccattatatcatcatgatcaatcaaatccaaaccttgtaggaaacacaaggcccttcacaacttggctcctgctttcctcttccagctccaactccctttcccccaccttatactctctgctccagccatgttgacctcctgtatacagacttaggggtgtacaaagttctttttcttcacaggcctgagaagtgctactctcttttctctgaggcctcaggccactatctttcttttcccattcatctcctggtaagttgtatttattcttctccctcatttcagacttcacttccagtagaaaatttcttagaactgtcccacagaactatcaatgctttcttgttttattttgcatttaccctacacagctatactacctgtttacttatcagtatatctcctgaaacagtaattagcacacatcaggcactcagatatttttaaagtggtctcccttagtccattttttttcactatatagactacctgagactgggtaatgtatgaagaatgtattggctcacagttctggaagtgggaagtctaaggtcaaggcagctgcaggtttggtgattgtgattcccagatggtgccttgcatatgaagtcttccagaggagaggaaggttggatactcacgtcgcaaggggcagaagaggcaagagagaagaaggctgaactcaactgtctatagaggcatacatcccacccatgtaggcaatgaaatgacaattaaatttcaatgtgagttttggaggagacactcaaataatagctgggtcattgaagaaatgaataaataaaacagtactggataatttgtcagggattttgttttatttcctctgtatcccagaatctattataatacataggtcatagtgaatctatactgaatgtttttaaattaatgaattaattcatgaatgagtcaggcaaagcttgtacacacatgtacacacatgcacacacatgcacactcacagatacgccaggatgagcaggttgcctctgcgggctcaggtggccagcttttattcccttatctggccccgcccacgtcctgctgattggtccattttacagagcactgattggtccattttacagagtgctgattggttcgtttttacagggtgctgattggtgcgtttacaaacctttagctagacacagagkgctgattggtccatttttgcagagtgctgattggcgtgtttacaaaccttttgctagacgcacagcattgattggtccatttttacagagtgctgattggtgcatttacaaacctttagctagacacagaatgctgattggtgtgtttttacagagtgctgattggtgcatttacaaacctttagctagacacagagcactgattggtgtgtttacaatcctctagctagacagaaaagttctccaaggccccacccgaaccagaagccccgcttgcttcacctctcaccaggataatatgttatattaggaccattcaatccaagccactctcatgtggttaattgacattgtctcttgagtgtccactgagaaatcattctgcaaggtgctaggtgctaagggactcataaccactgagtgctctcatcaaggagagtgactactgcagtaatatatttgaaacaaatctatggttttcctggtgaatatccttagtggcctctttttttgttttgcccccaggatgaaatacaacctatttaacatggtttccagtgccaaaccttgcaatctcctcctaatatgcctttctgggctcagctgcttctgtttcccaaccaccatgcctctgaccctctgccaatcccagaccctctgcaaattctgcaagtttactctgttccatcaggcatctaattttcagctggtgctcccgctttctgaaatatgtcttctcagttttccacttagggaactctttcttattctttaaacccacattcaaaatgtcattccttttgtgatacagctcagagtgatccaataagtttgtcactgcattttccttgcactaatggtaattcgtacagacctgtaggataaaacctttcaaacagaatggtcattattgatatgtatttgttggtgaatgcagtgtgcatcttgatgttaaggaatataccctatttatctttgagatatacaaccctcagcatactgataggcactcagtaaatatttatgcaataataaatgtacaaaaactgatttcttagtttataatataacaccatatattatattataactgaattcatcatatcccaatagatgggtctcactgtcttatttttgcagtttaggtttgaaacattacattataaaattctaataaattttctcagcagtttatatcataacaataattgtgaatgtttgagtcacatgccttagacatctgctattttacagtgtgcacagtttgtgttatgtagtatataagctgttaaattatatgccagtacatttgacaataaattaataatgtagtttctaaagtaagcattcctcaaatcaggatttcaggttccatccatgttctttgataagttgtaagatcttcagtagaggactatattatttctgtagtgttagctggaagtaattaataaatatagtattttatgtcacaatgctcatctttgtactggtatttccattacctacatgcttctttccttgatcagaatcctatcctaatgatgactaatggtatcccacagaggcagaaaatgaaggtattgaaagagcaggaatacacttctagctataaaattcttactgaaagagttgcgtgcttgaaatagaacacaaatataattgaatgcttaaaactgaacacaaacataattaatgctagagtggatttggtttccaataaaagtataaatgatttagtttaaaatgtttgagataaaaatattaattctaggttgtgaatgtaagaatgcatttggtagcaaggattgaatagataaaagcatagttcaaataaggtttaaatgctttacatgtgaattccaaaaacaagttgtttagcattttggtagtgtttaatatttatattataaatcaaattaatcaagagatttatcacattttaaaataaaatatattagattaatatggtttaaaattaactagagtttaatagcaaaatgtagtaacaattgcagttatgagaacgacttagaatctgaaaaggaatacatttactgcaacatgtacctatatgaacatgactttgtgaaccacctggaccttgaacatctgcaaagatgaagatgctggtgacattcaatagcgatttgatgaattaataaatatatattataaattctcttacgtttgtctttttatgtcagtgatatagtttggctgtgtccccacccaaatctcaaattgaattctcaggtgttgtgggagggacctggtgggaggtaattgaatcatgggggtggatctttcccatgctgttctcatgatagggaataagcctcacaaaatctgatggtactataagggggagtttccctgcacaagctctttcttttgcctgctgccatccatgtaactaagatgtgacttgctcctccttgccttctgccgtgattgtgaggcctccccagccacatgaaactgttaagtccaataaacttctttcttttgtaaattgcccagtctcgggtatgtctttagtagcagtgtgaaaacggactcatgcaatcagcatgtttgaaatggctgaagtagctcctttcttcaaaagaactccaaaca

SEQ ID NO: 95446 - DNA, 308386 bp, Homo sapiens
  misc_feature (1)...(308386): n = A,T,C or G
acagactaagatttcctgcacagatttcatggttcttattattttcctacaggcaggacagaaagaaagattgaagttccttctactgaatacattactgatgccagaggtgaagtgtggaaaatgaagaattagactcagggttggcaatctatagcttgttggccaaatccagtccaccacctgttgttgttgtttttttttaatacattggaacacagccattctcattcttttattcattgtccatgcctgtagagcagagtagttgtgacagaggccatatggcccacaaagcctaaaatatatacaatctggtgctttgcagaataagtttattgacccctggactagactattaaaaagtgaggattgagggctgggtgtggtggctcacccctgcaatctcagtattttgggaggctgaagcgggtggatagcttgaggccacgagttcaagactagcctggccaacgtggcgaatccctgtctctactaaaaatacaaaaattagcctggtgtggtcacgcatgcctgtaatccaagcttctcaggaggctgaggcacaagaattgaacctaggaaggggaggttgcagtgagctgagatccttccactgtactccagtctgagtgacagagcaagactctgtttcaaaaaaaaaaaaaaaaaaaaaaaaaaggatgattgagtaatttagttcagttctctcattttaaagataataaaaataaagacatatgatttatcaaccactgggagtgaatggttccatgttggcagcatggaacagactgagaaaaagagatagatgggcttttgcaaacctatctctcctggattagggcagagtccacagaagggaaaatctagcagtagaatatctacaaaatgtaaagtccaagagaggttgaatcacaattctcacatttcccaatgaggcttctgagagggataactgggatggcaccacgaggtggaatcaaacagtggtggaatcagtgataggtatctgggtcctacttgggcagacatggaaaactaggtgggagtggagctcctagtgttgctggagcaacacatgtgcatagatcctgggggctgggccatatgaggcattaacccaggttataaaccacggtatatgaagaaacctagaaatcagagcatatgaaatagcaacaagcattaggtccaaggtgggtgagatgagtccataaataacaaagagattcttgagatctgtatcagtcagggtcccagcaagaaacataaatcaccctaaaattaagataaaattaagataatctgaggagagtaccagagttggtctgtatgattgaaaaaatgtggcagaagtgatggcctgttacttctgagattaggctataaaagactgcagcttctattttgggatctctctttctctgatgatcattcttaataaactcctttattaggtgcatgaattaatgaaagataaaagataaacaggatgccgatcccctggtcctctcatcctactttccctgtctcagagtagttttgatcagagatgagactgttcatagttaagccttcctccaccccacaaactcctcatcacccaaattcccatccatgaagacagaaccaacttcttactagacccttacatgaaaacagaaccagcttcttactagaccctttcattcaagacagctatagtagaaatgctgggggtaaagttctgggggtggtcctttttgctttttggattttcttgatgacaaaaaagagttctaaccatgatttacccaaatattttgtcctacttaggggcaaagtttaatacattagaacattattctggtggattagtttggccagcatgaatctatcctttgaataatagtacactctgagccaaaactaattcgctttctaaaccagaaaaattagaatgtgcttaatatatatgtttccatggggataaaaactatctacagaagcctgatttgcttttctcatctcaactcccatttatagataatcacacacaaaacagtgtctactgacttcatcatctataaggaatgccaagtatcatggtacttggtagtctatttcaaagtcaacgtgttaccaacataaattcacttttggcaatgtatttattcatttactccttaaacatttactgaacagatacatctttcttattttcacaaggcgctaggtgcataaaaaagaaataaactctgctcttgaatgacttacatccaacctaggggggacaagtcagatataaaaaaagaacttgatgttaagagttacagtaagaatatatgcaaagggctatagggatagtcttgtaatagtttttgatagttccagaaacactttgattcttggaataagaaaccactagtttagcccttatactaatggcctgacatttttattgaaccagaaaagattgctatatataagaaatttctacaggaagaaaacattatatatttatttgtcttattagagtgatttttgaaaagaaccaaaattataggtaggatacaattcaaatggaaatggtgtatttcctatttcttagaaaatattcagagcagaatctttgcacatgctatatcatgacagagttatgttacttcacctatatataacctaatgcaattttcatatagttttcttagaaaactatatgtaaacataaagaaaactataagaaaatacagttttctaagaatccagacacctcaatagcttccataacttgggagaatttaatgttcagtcctttcatctattacttgtttttattaattatagaatttttttggatattatgttttgaatagctacttctatttaaaatttaatagctagttttctttaaaaatataaaatttcatatataaaatatgtaataaaaatataataaaatatataatttaatatatataatattaaaaaatatataatttcatatatatccaggcaacaatgctgggttattttgctgatataggaaataaggccattaggtatgttgcttggttggtagaaggaagtacaaagtttagggattattctttaagtagagcagatgagtattaagtctgaaatctgtgataaaggagcattaaaaatactggcagccactgaaattcttaccattaatttatctcaaaccatctgcagatgtgtgcatattaattggctttgggcattttgttacctaggaggagtaacacatatgatagctaaaattagaaggcaggcaaaaaaaaaaaaaagtgaaaatacaaagcttggtattccaatgtaggtggggtgttatagcaagagaccctgccaggcaggagtccttaatcactgtgagacatgagtggcaaaaagtgcttgaggcatgttactgaaagacaaagctatctcacacttacgtctagatttgtgggtggaagggtgagagttggagctattccccattcacactgccacacatctttgtagcatgcttttcattacatggatttgaatacatcagtgatcagggtgatgagtgagggggcgatggaggaagccagaaggaaaaactggaaggcttttggctttaatctgctttgcttgtttaagctaaggaaaaaagagcttcttagcctttttaaaaaaataaactatcacaataatgaaaatattaataaccaaaataagagctacaggttatgcagagcttgttaggcagtaggcactatgttaagtgctttatgtacatcatctcacttaatgtccctgtgttttccctactgtccccaaacagtaaaaatctcttccagaactgctcattcaccatctcctagcagacacaccataaagagatttcactttatttgcaattctgcatttaaaaattctccttcacccttcaccttgttggagctactttctgctttgagatggcgaacaggtccatctgcttagagatggtccctaagcattgaggggagtggtatccctttccctctcacccaaggccaggctcagatagagtgggcttcttggccaggcaaccctggatacttatcattgtaggaggaagtgccttagaattgtctcctattgagtgaactgtaaaccccagcccctcttagttcatgaattcaaagccgtcactcaccttgtgcttacgcaccagggcaaagagaatggctatcttgcctcaaggaagcaattggccctaccaatactaacaccttgcaattctagtgaacactgtttactgttctgaggggaacgtgacaacaaggcagatctatcttggatgccttccaagaagccgagcaccaaagggaagtcctgatataaacaggcatggaaggaggagctccaaataccctacatggttcactatagaggctttgctgctcttcaggagaacctgatctcccctacctggtggatggagacttactctcacttgtcctttaagcaaagagatgctgcaattctacttctttcaaggatctactgagaaaataaacctgccactacacccagggcactttctctttttaagaactttcctttttttctctccttcctctaagtctgttctcctaaacttttgttggtggtatttagacatgctgtttttttctcctctgggtgtgctctaggatttgatctaattgtcctgctgttcgagtgtcacttggcattattattgggaagatgaatggtatgtgggtcagagttcagcaagaaggcatctgctcgcttccactgtaaagtggaaatgcttagaggtgatctttaatgaaagcttggaaaagatttgcacaaggcaggctgtcctctattcctccaaagcagaggggaccaaaggttatccttttctggagggacagaaaatgaataaaaaggaggtagaaatctctttacagggagtttcctgcttgggatgtcttttcttctgtaggaaagaaaatggggtgtggtgtgtggggagacagaacgattaaacagggaagagattgaaaatagaagctcttgaatggatcctaaccattctgttttgctcacagaacaatctgatccaagaagtttccactctacttgcaacgactctcacctgccatctcccctggcctcaggttactgtgccatagcaggctcaggttctcttactggactctcttcgagttgacagttctcccactttaccaaatagccagaggcctcacaaagacctagaattgcgttggcattctaggcaaggggacaatgaacccattgttctttttttttttttttttttttttttgccttcttaaatagggcaaatatctcttccatttaccyctatcatcaaaggaggcttagtatggggtcctcagagactcaccttccttccactcctcctttgttgtttggaagagttatcgctagcccccttctcgccctcgccccattaaagctgttgtgggacccgactggacgttgccttttcttgctcttaaaggagtggaagttgggaggggaagaaagaagcacacaccaggaaactcattttagttcggggcgacctgcagcctgtggttcctcctggacctctggggagacgcatctcggttgcccgcagggtagaaagcaagagaatggcccacaggaacgcccgcgccagcgctaaaaccacaccgggagaggacagccccacgttaccgaggactcgaggcagaagcggtctccaaggatgggtggggatcccaccactggcttccagctctgcatgcgccgcggagtccccgcgcagggcgcacctttgcggcggggtttccccgctgccttctgggaaccccgcggagcgactgccgctggacgcaatctggctggcttgcctctaccccgagctcactctctctgctctgtctgggctctggagccagagctgagtctctcttgagcatgcgcagcccggcaccctccccgcctctcccctcctccgccccctccgcgccagccttttgctctttcctttcattaaacaaacaggagatcctgaaacctggaccctgtgcaagctgcagcgccaggaggaggcagcggaggaagcagagcgcgggatgggcgcccagcggcatctgtgatcccgcgcacctccgccccacgggcgcgcgcacaaacacggacacacacatacacacactcgcgcacacactcgcacaaacacacactcgtacacgcccgcgccgctcgctcgccggcttgctctcccacgcaagcggaatgcagcagcgcctggagagcgtgtctcggaccgccgcctgaatgtacctcgctcccgggagccggacggcccagtagggcgcactggaggacgctccgctgcgggaggtgagtgcggcgcccgcagccgggccgctggggaagtctctgcaccggggcagtagggcagcgcggggcaagctcctggccggacccggcggcgcaggtgtcccatgccttgcttgtgggtgtcgaggtgcagatgaaggcggcgctggggctgtgcagaggagaggacgaacccagggagggtcgcctcctgcgaggtgtcagattgacccagcagaaagctaccacctccctgctcataaactttccttccatgtcatctgggaaacgtggagacaaagggggcgtggaggctccctccgtcccgttccaccctcctgactgcattccgggctgcaacgcgagcctgcacgcgttgggtgggtgtgcaggcggaggcgccctgcaggtagctgatgccaagtcctcccacccgggcgggggttgagatttctcaccccaagctgtaagggttgccattgattttccctcaggcatgggcacctgtcatccttcccttccacccctctgcgtcctaggcgcatagtggggtgtgtgtgtcacctggaaaattggaggggcggccttcggctttctcatcgagctccggtgccaaaggcgccggggtgaggctcgggtcagtgcggggataaatgatgagttactgacaggcttgccataatcacctcctagaacggaggacgctaggatctctcctcctcagggaaggtgctgtcttcacgcacaccatcgcggcagcgctgggagctgaacaggggctgctgctgcggcggcggcagtgggaagacggggctttatcctctcccaacccatttcccaagggttttatgacacgcacgtgtggaatatgtggaggattctggattattatttttctttgtggggatgtcgggtttttttcctttcaacctctttcctgggagagattctgtggtgtctgctatctagttggtggacaggcacggttctgaatatctcttcggcccgacggaaaaggtcctgagaaaaggatttcctaaaatcctttctactactggggcgggatctcagagtgcagtgcacccgctgcacccgggaaaagcgtcaaatcgaatggccttttgaaacagcagagactgggtcagcctgtgaggagtccaggactgggacaaagggagatagaagagggacaaataatggtcacttaggagaggtgtgactagaggttaatgaaggcaggaagagrttgactggaggggacgtacactacagccttcactgaatttctatgccccttctgcttgtatggttggcagctcctattcttctggtgggacgctagttttgaggtgtctagaatgtcacatctggagcgtaaaagacttcactatttctgggataacrtttagcatacttacaaattagttgtttaggtctagaaagtgcctcgtgtgaaagtttctccatcttgacgtgttggttgtacctgaaaggcgggttgggcagacaggtacatttttggctcttgtgcacgtcaggagccttgtatttttaggaaaagtgtatggggaatctggaagccaagctgatgctgaaagaagtaaactccggaagctcagatccagtacttatgcctgctgctcctcacgggtgggggtgagggcttctcttcactttgagatgacaggttggggagtctctctgctgcttgggatggggacctttttatctttaacattttgtgacttctttgaagtgggagaaagcatgatatttgtgagattaattgagaaatgacttatgaaagtgatcttcactcataagtaagcatagccaaaggtgaaaagcttttttaagaaaggaaaaaaagaagcagggggtgggggggaattgggaaagggatgcttattattaaaatagtttcgcttttatgattttaaaggtattcagtaagatagaaatctgagtgttttattttcaaataactagggaagtaaagacctttccaggaatattttcaagtgaaattggcatagaggggatttaactataattgtcagcatatgtcctttttatcccatggtgaacactctcatcattttctttgaaaaccttggcaagaaaagatcaagaatattttttgctttcactagagctctttatttgctttgttactatatrtttcctcttccttcatctgcaagatcagtttattttgattatactagattctatttacaaggatttattgaccacctatcctgtatttagcattggaagtcatataaaatatgtaacatagttctgtccctcaaagtgtttatgttctagttgtaaatacaagatgaacacacatgaaatagaaagcaggatggttctgtattgtactatgagctcttaacgtgtatgctgtacacttcatcccctcctcctggattttctcaccattcagaaaacatgtataagtacttgttacatgctggaggctggggaaaaaaagataagaaagtaaaaaatggtcccaatcrtcaaggtaacaggtatttaactatgatgcaatctgattaactgctgtaattgtaggttaaaccatgtgccaatagtacaggcatgaaagtgattttttcctttccctggaggatttgagcaggtgatctttgagaaaaatgaatagtcttttaccagggaggaaaggatagaaaggacattccaggcagaggaaatacttgagagtgtctgataaattagggtggcaataagccatctcatgtggttagagccattgagggtgaacagcatctgggtgacaccagttaacaagtaatgctatagagtgagttttttagagatatgctcagaatgccatggaagcacaaagggaggkcatccaactcaaggagagtaagaagatcaagaaggtttctcagagagcttgacattagctgagtcttgaacaaggacaaggaggaaagaagggctttccaggcagaaatatctctgaaaggcctggaagtagttctgtgtgkctgtagcgacagatatgggttcttagctttttgcagtggcacaacatcaagcaagagacataagcagcaatcaagtgtgaatggaactatccaagcataagaacttcaattttatggggaaggctaggggtgtttgtttgaaagttgagaaagtttgagacatgatcagatttgcattagagaatgatgactgtgacyacagtgtggaggatgacttggaggtgttgagactggaggcagggaacttattgtggaaatgtaggtgttaaatgatgagggtggtggcagtaggggtggacaagaggagatgtatctgaaagacaagtgaaataaagcctgctaatataagaagggccttccttcttctgtgtgctcctatatcaccctcttctttcctggcattcacttgtgtagctgccttttttgcattgtgagagtaaggcattcacagtggcatcaccagcatttagcacaggcctggtatggagtagggacccaataaatatttgttgaatgaatcattaaataaatgaatgagaaatccagccatgaggtgatgattcctgcattagaatagtagaagataaatcatgacttccatttctccaacgtgatcaactgacttggaggtcagtgttaaaatgtgccaaggaggccacaaatcaaaacaaaaaacatattttctcagctgcccctatgaagaagaactgtaccctgaagtgccactaagaaatagcatcatgactcttttttatgtttaaaaaatgagctcatcactgcatcttggaagcaacagcatttagcacagttgctgatacatagtagtatggcagtgtgtataaattcccttttccccctttcttgtcagaatttccggatttaatatacattgtgaaaactttaaaaataatctgcaccagagagttcataaggatctcacttaaagagctcattgcatcttggcatcctggaatgagggccagatcatctgtgttccagccatcaacactgcagacccaggaactaggtcccttactgaaccaagcccaaacatgttgaatttcaatctgaaaatgccattaagagatgccagaatggggaaaaaacatagtcagagtttgttttcaaattgactacagggagtgcaacagaaggcaaatccaagatagcacttcgggtttgaccattggtagctggattgatggtgacagagggatggggaaggaggttagctcaggaaagtaaaaggcttaatgctgttttgcagaaattgattttggggtgacaccagaacatcttggaaagcattagtagagatcccagcatctagtgatttcatagtaaatgccaagtattatttttattagsgaagaagatgggaagagaaggacaccatacagccaaagactaaatttcagcatttagcaaaatatagggattaaggagagaaataagccccaggaaagagcataggaagtgaatactcagacaagaaggaaaagaactggcatgaaagcaaaagcctcagggaaccatgaggagtgctcagacttcacagaaacagtcccaactgtgccaggacttgtttaaatgcctccacgtggaatcctatttaatcttgacaacacctatgactcctattcccactttacagctgaagcagctgaaacagagaggycccagtagcttgtccatagctaccaagttacaaagtatcagagtcaggtctcaaagcccattttcataattgtacaagcaatttcctttcatcaaatgtataaattaccaggatgattttaagtgaggggagtttgaaaaggttgaaagtagggaactgaaaaaggacaatgaaaaagagttttctggtgaccattaggaaagcaattttagtatagcagtgtgctcagaaaccatttcagagagttcagtggggaatgggaggaaaaaaaaaacgtgcaatgcgtaactatcagtcacttatgaagtctagcaggggaaagagttatggggctgtaggtacagtgagaaggtacagtgagtctcaagtgcattttttatcaaaagggagcagatggaaccagctagtgtctaagaacaaagggtttgggaaatgagaacaggagaggagagagagaggagaaaggrtgcctttctccaagagcatgcaaagatatatttgaggacagatacagcagatgctyttcttccccacaactacatgactgaaatgagtcctctaaaactcagagaattcagatccttgaatgtcctggaaacttaaggagcctctgagtgccatacctcaatggtaccacttgggcatgcaggctgatgagcctgacttgtttatgtagcacagcrgttaagagcacaggctctagagttaggctgttaacctgaattaattctgaattgattcagaattctaaattaaatgaattcttaattctggctctgccacttataaactgtgcgactttgggcacacagtttacttctctgtgctttcaattactcctgcttttaagatggatcccattgcagaggtttgtgaggattaactgagtttgttgtaaaggtcggacagagtaagtacctaataaatggagagtattaagtgtgatagcagtgaggttaaaaacataaagctttgactttatgctcaggactcaagagatggtgtgcttttgcattcattaaaaaatttgggggcgggggggttggttataaatagttggcttgaatcctgtcttcctaagtgcagaaattaaatcagcagacacaaatatggcaggcgcagaccagctcggctgtcataagcctaggtagagtagacatgtgctggaagtacctgccaataacacttgcctagttgcccacttctcacacctgtctggggaagatgaaagtttgcttgcgtttagcctagtctttgcaccttcaggctcataggcatcagacaacagggacttagctgtttagcagattgttttagggaaacgactacttgtattaattacagcacctctttggtactgagggacataaactgtaaatatctcaaatgtgagatttacaacattccgtaggaaattaaatgcctcccttcatggaaaaatttgtcatgtgttctaaaatagaatcccagtggatgtggaaactctgtcatctagctatttggcagcagggcaggaactgcaacccrggtttgactcataactctgtgtctttgcattatactctggcaaatacttctattactgtgctataatcaaagactttttaccccccatccatcctattaatgtttcatccaaactaaacttcttacagttacccccatgagatttttctttttaccttcaggcctttcgccatgctgttccctctttctggaattccgtccttgtcttcccctaactcctttgggtttttaggtcagagtctctttctagggaagttgtcctgacctcttaactctaaggttggcttctctttctatgtgtttcagtagtccccaactctgtatttttttgtgcctaacatagtgcttggcatatataagcgttcagtaaacgtttttgattgaataactgaatcaattactgaaccaacttctccttttgagtcattgatgacacttcaaataaagcaacttcatattatagaaaatcataggattgtcccaagttcaaagattcgttagaagttacctagtcagactttcaagtgaaatgacacaaggaaactgagaactaaggaactgcagcaacttacctgaggcttttgcttactgtagttaagtgatatcagaatggaggccagaattctcatattctaatttcagacccagattctgcccagggctggggtgagggtggggtgagagaagcaaacgcaggattggttcctgactttatttaaaattttgatactgtgtgtgttcatcatggaatgttgcattacgatttttttaaatgttgcattaaaatattgtttaccttgattactgagttttttggaatgtcttaaattttgtgcccaatgcaggtgcctcactcatctgaccctagtcccagccctgctctttccacaaaggatacatcctagctttcctatactggtgtaaaaatgcaggaacagtgtatatggcaagggccctgattgaaaatattgaaacaccattcatcattgtggtatgaactgctaataagcatttcatgamctggctaatcttctggtcaataaacgttatattcacattgtaaaagcaaagccaaaaggataagaataaaagctctatctgcctgtcatctctctatttatctctttgtcttagggctagaggaaaatgtaaagatcatctagactagtccttaatttgtaaatttacatgtagttattactatacttccatatttttaagtgttttgaagacccaagacccaagatagaaaagagaagaaaactattccatttataaacttggctggtcttggcttatggcactgctggcctgttttgaagatttgaggtcagaaggtagaatggccaagcttggaaggtagaatgacaaagcttggctatttctgccaaaaaaaaaaaaaaaaaagaagaggaagaagaagaaaggaaagaagcatgaatgaaaaggataaaaagaaatagatgaaagacattttcagtaggcctcctatgtaccatacgagctactactatggattattaacctctacaacacactggaaaataggtatcagtatccccatttgacagctgagtaaaccaagtctcagaaaactgaattaagagcttacctaagctctcaaagctaccgctggactgaaaacctgatctaagtccaaaatctatgcttatcttatttaatccttctgattctcaaaggtgtagagtttcagatcaccccataaccttcttgccacccacgatgccatgaagcyttagatgagagcttcagcagcttgtccatgttaactggatgggaagtcagcagtcagctccacatcgtgctgttatttcctcattatacggtacatttatctttttccattcatcaataacagggagaagaactgcatacacataagaaataaatcccctgcttgtgtgaatgttataaatttttacatgacatgatagtccatattgtatattgcctccattatgttagaaagggctttttctctgggtattatggcatcaagtgttctagaaatgcttacagacacagggtgaagaaaaagtgatcatatttactggagcaaatctgtcacaatgaagggtaatgtgtttgcatggytctctgtcgaggggttctggggtgccctttttattgaggtttctgatgagtagcatggacctcccccaccaacatttagattcaatgaaatacataatcaagtggaatcagatacaattaacaagaataatatctgggtgagagcactgctgttcggctcagcagctctgtaagccaagcatgctttatcattttcccatctcccagcctttgctagctatcgcttccaggcaacccacacactcaaatgctctaataatcagcccacagccttccctcctgggggtcacaggaactaaaaaatagaaagaccttttcattcacacttgtattaactggaaaaaacattatctgtctgtatttttttttttctgctgtaaaagcaagggaatatctctaggtttgagacagtcttttgggtctagtttttttttttttttgcatggattgacatgtaatatgtgacacagacagttcctggccaggctagtttgaaacaatgtattttagcaattaaaaatgaattaagccaattatatgtgtactatgataaaatacaaaatgtagatataatgaggtgcttagtgtagaaagtaaatatcactcatatttctgctctaacctctttcccagaaaacgactatcagttgtttggtgtatatttcttcaacatttttggtccattaacatttacatttattatttttataaaggtaggattaactttacatattattttactatttacttttagctataatttcaaatagaagcaatttcttttcattaataaatatttggtaaatattactcttatatgaaaaggatgactgttgctttccatcttaaaatagagctcagttgatatatcttagggtcctttggccatcagtcctcatgtatattcagtcattgaacaaatattttttctgagctcatttgaagagctacctactgtactatgtactttggaaacattcacattctagcaagagaaaaaaataacgagaggacttaataaatggcaaaagctgtaaattctccttgattcacagaattgcttgaagggctaatctaatttttaaattgtctaatttttctagataagaaaattagggtccatcaaggttaagtgatttgtccagggttccacaactggtgattgaagaggctgggataacaggcagtttccagcctgttaaaccagtgctgatttcattacacttgactgcaaatcaacccccacatcaagaagagggaacaagggaactccacaaatactagcttgagcaacggatttctggcgcattgaaattcatgccttatgtaactgctgttaacccacaaatggctgcagagattgcgtgcccatcctcccgcccatccctgcccatataacccctcactgcactctatcttctccttctccatggcctgatattctcacaatagaataacacttcgaagttagacaacaatcagctgtaatattgagatcaggtggtgcccatgttacctagggagagtgttcatctgtaaacatattggtagagatttatttttcagtttagcttcttgccatcttgaaccttaaggaatgaattccaagataaatgaattttacctgctaattttaatcaagtcatgaaatctttgttgtactaaccaatgatttttctccatgatagtagcataaatagaactctgattcttaaatactctaattatccttccctgctctgaaagcaggatcatgtggtggttaagagcttggactagagcgtcagatggagctaggttctaggctgagctctgccatccactagctttgtgatgttattccaattccttactcttatgaagtctcagatcttttatctgtgatatggagataataaaagtacccctcccacagtgatgtttttatgagataaataaattacttgcctgaacacagagtccacaacatgaccaatgaaactgtagctgccattatcattcattatttttgatatacccatgatatacagctataagggctatatcacttgacatagtgcttagaaccatttagatgtcaagctttaaaatactraataacactcttcttaccttctgtattagtccattttcacactgccgataaagacatacctgagactgggcaatttacaaaggaaagaggtttaatggagaactcacagttccacgtggctggggaagcctcacaatcatggcagaaggcaaggaggagcaagtcacatcttacgtggatggtggcaggaaaagagagcttatacagggaaactcctgtttttttaaaaccatcagatctcgtgagactcattaactatcgtgagaacagcacaggaaaaatccaccccataatttagtcacctcccaccgggctcctcccatgacacatgggaattgtgggaattacaattcaagaagggatttttgtggggacacggccaaaccgtattgcctcctaaaaaaaaaaaaaaaaaatagagacttaaaccagaagttgaaaatatgactcaatatgctaataatttgaaaacttttcagaatatcatctttagtcattgctgatccatgaactgtagaattcagaacatagcaagaggtgggaaaatgaaagcatttgatcaatacatcaaaactttgctataaaaattaaacttcagccctctttgtctgcatgattttattttcatgcaaatacttgggaattggtgataatgtctacctttctcaagcataaagwtaacactattatcactattagttaaatatgttttttcaagtctcatttgccttagttatactggtaggtcacctggatgtagacacatatatatgcttgcacagaatcatggaactgaggtgtgaatgttaagaatcccagccacttactcagtgctggaatctcttttttcatactatgtcacaagaaactgtccagcctctcctttttggcatcagggctccatttcttccccttcttggtgactataatggatatacccaagatagaatctgattgggtgtgagctgtggttgaccaggatcctgagagttgttcatcaaacatcccaaacatactttcatctcagggtctttgcgtttgctgttagctcagtctggaatgcctgttctgcaaaaacttgaatgtctccctttcccaccaccacatctgctcaagtgtcatcagacaggccttccctcataactgtctaaaacactcagcccattaatctttaactctttactctgatttgcatttctgcattagtactgataaatgccttattattcatatgtctgtttacttgtttatttgtgaccggcctccttctactatgtaagcatcataagatgagggactctgtatattttgtccattgttatacctccaagacctagaagagtacctgtcacactctataaatttaattaaaatgtatttaataaatgaacaaaagaaaaaaaaatatcgtcttgagaatggatttaagacaccggtggcaatcactaggtctgaaacgcaggagagcaagagaacatctaaaatgtgacgttagctccagaggcccagaatgggggagatctgtgaacgcatagtggaaaatggtccccaatgtaggggcttggtcccataggacagctcttaatgaggcagaggtgtctcaacctgggtttcgagtacatggatctctggtagttggggcatatgccagagagcttacttatgccatgagtctatttcactgtgggaccttccaacattaaagctttcttcttgatggagctgaattctgcctccctctagctagttaatggaagatggccaggtaaagcggtgcaattcatatggaagaagatgaaattaagtggtacccatagaaatacaactccattttatattaatataaagactcatttgtctacaacaaaataagcaaatgcgacacagattaaggaatcaaggtgagaaaatacctttggtgaactaaaaatatttaggacatataccttcttatttctatatatgaactgttattgaggaaacacaaatttctatgggaaatctagctatcttgggatctttaagtgtgaatgtacctctggctactaggtttggttctgggtgaaatgctgacagatgttcttatgtggtttattgtggtctgtgtggtctaggggacagcagccagaggcagctctgtggaggactttggggccataaagaagctttggactacttgaagttgtgcctggagtccctcctggggaagctgtgtaaggagtggcagtgttgcctgaaaaacataagtctgagtctccgtctctgtggatttccttggagagcaattattgaatgttttatggttctcttgctttgaacagaagttttcactcacttaaatgccaactacatggaagaatgtactaaaccaattgaaaagaaatgtaaaattcttggaaagtttaaccatgttaaaagagaatatgatggcctagactcttaaaagatgttagcttttatgagcgtcatcagggaaggtaagtctggaggcaggtggtggaaagctaaacacatatagagaaaatataatttatagaagaagaacagagagaagagaaatttaatcattcagcactgggtaaatggattgcctgacattacaacaagtttaaagtcactagaggataaatcagaatttatcagataatttgtagctttttcaatagagcatttggaggagagaactccacatagcttctttcatcaaagggtaagccttcatccaagagtgaaatcttttccctctctcacaaactctccactcacctgtaagtttttgttccttcaggtgttttcttgaattcaagattctttgttgtggatccaaggggacagttgctgagatgagggtttctttttcctcttgttcattcagaaagcatttactgatcaccctagggacacttcttttgtctaggaatttgcctggcctaccagatcttctgtagccaagagactttctgctagattccccctcatgccacattggacaccatcctgataataatgatgggttacctgccaaggtagattcacctttcaaagagacctgctactgaacatctagaaccacagcaagagacttgagaacttttctttttcttcaaaaaaaattctggattatttctcaatttgagtttaaggaattcctataacttaagtgattatacttttgaccaaaagaaagtttaatgaaattataattcccagggtaatattctgtaaatgagaatgatttaaacatttttaaaatgggaattaaaaataattgtttgattattataggagatgaagacacatacttatcagtcacttcatatggaattcacccaggataatttctcctctgacttttccctaatcttctgccccttttctccagagctgctttccctttgcayttttttccataggtttttggggaacaggtggtatttggttacatgaataagttctttagtgatgactttggtttgcccatcaccggagcagttacacagaacccaattggtaaccttttatctctcacccccttcccaccctttccccctgagtccccaaagtccattgtatcattcttatgcctttccttcctcatagtttagctcccacttatgagtgagaacatacgatgtttgtttttccattcctgagtaactttacttactataatagtctccagtcccatctaggttgctgcaaatgctgttatttcattcctttttatggctgagtagtaktccatcatatatatatgtgtgtgtgtgtatatatgtatgtatatatgtgtatatacacacgtgtatatatacacacatatacatgtgtatgtgtatgtatatacatatgtatatacgtatatacatacacatatatacatatgtatgtgtgtatatatacatatgtatatatgtatatgcatacacatatatacatatgtatgtgtatatacatatacacatacatatatacatacatmcatcaatatatcagtcacagtttctttatccactcgttgactgatgggtatttcggctgtttctacatttttgcaattgcgaatttcgctgctataaacatgtttgtgcaagtatcttttttgtataatgacttattttcctctgggtagatacccagtagtgggattgctggatcaaatggtagttctacttttagttctttaaggaatctcccccactgttttccatagtggttgtactagtttacattcccaccagcagtgtagaagtgttcccttttcaccgcatgcaccccaacatctatttttttctttattattttttgataatggccattcttgagggagtaaggtggtatcatattgtggttttaatttgcatctccctaatcattagtcatgttgagtactttttcatgtttttggccatcttctagacattggcttaggcaaagatttcatgaccaagaacccaaaagcaaatgcaacaaaaacaaagataaataggtgagacttaattaaactaaagagcttttgcatggcaaaaggaatagtcagcagagtaaacagacaacccacagagtgggagaaaatcttcacaatccatacatccgtcaaaggactaatatccagaatctacaaggaacgcaaacaaattagcaagaaaaacaaacaaacaaacaaacartaccatcaaaaaataggctaaggaaatgaatagacagttcttcctttgcatttgtatttgtctgctctcttgcgtattttgggcagcccttgctgctgactcctactgcttgatccccacactctcccctagacaactttgcagttcatacacgactccctgaaagagaacacagaaaacatttggaagtggtggagtgtgctgtaaagagtgtgagatttctgtcaaaagttctgattgtaagccttacttctggcttattcactgtgcagctgagaattttcttaacccctctgagatttcattgcttcatttgtaaaatgaagacaagggtaactcaaagagaattgttttgagataaagtattggagggtaaattttaaaattctgcacaagtactcattaatacgttgtttctaatttagcaccatcattttatagaaaatgaaaggagatgaagtaactcttccagcaatgtgaaactcaaatttttactgttcatttttcaattgaaaaccaaagcatatagtatgaatcagatggaaatgcatgtgctggctgaggatataaatcaccctaggatcagatgtgtttctctttgatgtgtctaggaagtgttttatggtaaacttgagtacacgtgtggcattcatacagggaatctctttacctaatttgcccaaaattacttacttaagggtattaggtgttatgcttactatgttcccttcttaatttgaggactatctgagattacccagaggagttaagaagattctcagccttgattttaaaactgtagatgggtgtagaagggggctgcttacaaaagatgaaaatggaaagggtcaagggagcaggggtctgagctgatccaaaaggaatcagctatttcaagactacctagattagaagcaccaaggtcttgccagacatagctgtgtggtttgaaagcaccaaactcagtgccaaaagaagggtctcaatgccctcgacctctgtagagctgggagtgggagcagctaaaaccattttgacccgaatcactrggaaaattcaactggatgaatagtctagatagaatctgaacaggctgatggaggtcttggcagttagacaatagttgaaactaggcacattcctgttcttttatttattcaatatatttaagtatgtattaaatatttgtggaatgggtgagtgaatggaagtgtaataagtaagtgaatggaagtgaatgagtaagtgaaccaaaagagcaatgaatacatggaatgactctgagcttctgagagttggaagctagatgcctaattggcaataggtagggagagaatgagccaacaatgcactggattagagatctgaaatgattactctaaagaagcatattttaacaagacagggtcagataagaggctagccccaaagctgtacaagccatgagtgatgacaacacctgatgtttgaagagtttttaatatccttgcactgccttgtggacatagtataggataataggaagagcttgggctctggaatccaccagatgatttccagttctgatttactagctttaacatgggaaagatatttaacctctctaaccttcaatttcttccttgaaaaatgggttcataatacctaccacatatgattgttgtaaggagcatctgagctgtctgtaaatctctgggacattgttcattctcaataaatatcagttatcttcccctttccttgatcttagattacaaaaatatcagcaacatcctccagatatggacatgttgaaaaccaacaaaaaatcatagcttcttccaaaattacagaaatttatattaactaaccaacactggtttactccacaaaattcaacatacacattctaatgcatctatgtgtctgtaagtgcactgcattgaggccctactaaacacaaacttcactttatccattgctgtgtgtggacttcacccaggagagtttctccttggacattttcccagttttctgccctttttttyccccagagctacttttcccttgcttttgtctttgtctactcttctggccattttagacagccttgctgttcctaaatgcatgacgccctccccttcccccagactgttttacagttcatacttcccctccacccctgcccagagcaacaggaaaattgccaagttgcatttttccttctccatcatctgctccaatttttctttacctcttttattcttttttttttttttttttttttgagacagagtctcgccatgtcgcccaggcttgagtgcagtggcacgatctcagctcactgcaagctctgcctcccgggttcacgccattctcctgcctcagcctcccgagtagctgggactacctgcgtctgccaccacgcccagctaatttttttktgtgtttttagtagagacaaaactttcaccatgttagccaggatggtctcgatctcctgacctcgtgatccacctgcctcggcctcccaaagtgctgggattacaggcgtgaaccactgcacccgggctacctcttttagtgttacaaaacccagtaaaacatcctttaatctctcagtgttttctcaactcttattcccttagtttattcttgctgttaygaatttcataaatccttttaattattttattttaacgcatttatcttggttaagtatcactgttagtatatggcctttaaaatggaacttactgaaacccccccttctttggtcacattgatctcactagattgggggtcgggggagaagagggttggttttgggatgaaactgttccacctcagatcatcaggcattagattctcataatgaacacgcagcctagatcccttgcatgcgcagttcacaatagggttcgcactcctatgagaatttaatgctgccctagataatacatcttttcttccccagcagaatgatttatagttttttgagtcttatttttactctgagattcccctcctctcatatacatacatttagtccttttaaccatttctagattaagggatttttgctccttctaggaagttcttgcactattcctccttgacagttgggaactctcaagttttgaggatgtcttccatactttcacatcactgttgatcagaattggttataaagtaataacctacttaatgacttcatctgtccattgagaagtgaacttgcgtaaaagatgttaagggtatatctgagcgctgtgtgaagcaaattgtcttttagccagtttgtggatatttgtcttctatacctactctgccttattgtggtgcatattctgtgctttgtgtcgggaacacaccattccttcccttcatcagcccaagcagtctccatcgtaaccttacaatggtatcatttcaatttctctctcttttcattttttcagcttcattgcagccagcatgaatccaccccgaggatggaatcatgtgatttcctcagtatttgatgctcagtacctgtgctttttaaaagtgtgaatttataatgctcgtgtaatttataatgctcaaatgtcatttaaatgctcatgtaaaatttataatgctcaaaacagtagtctgttttgaataccctcctgtctttgagcagcccttcaattttgttttctacccttttgattactctcatgttttctttgctcaggctactgatcacagctaaggtattgctaagaactttagaaactgaacctttaatgttgaaggaagtgatttaacttaggtgtatcttgcggttttcctcaaattgtgccataccggtaggtggaccccagcctagtatatagaaggagttagaaaaaaatgtgttgacttgactgactgagtgaatcacctgctcctttatcgcatgtgccacactcaggtaccatttggcccaatttcatttcttcttcttctgtgtcttgagaactatgtcagcagaaatgtgtcagagaaaccagtccataaatagatgattactcatagggagagatgccaaataggcttgttctgtgtccaagaaaacactggggctcctgaaaagcaaaatgaaaaatgacaaccgagtttataatttcactgggaagacaaaaggcatagacataagacagcaaaatccttgatctagtgaacattcaagataggaggtaccaggccttccctgagctaattaaaagtcacagggatcctagagcccttgggcctctcagaaactgtgttaacttcttactgagtctcttatatattcctacaagatatcagagaagaatacaccactttaggttgtaaggctaacctggagaaatggggcttagagtgagctaatgaatcacaataagccaaaaatcacttttcaggaaaaggcttcttttactttaggtaaagtataaagattaatgtgacactgtctcatttcagggagagtcacagaagcattgattttataataggaaacatgcacatctcctaatgcatttgcattgaatatacatacttcaatagccacaaatcctcagaggtcaggaaaaatctgcattcagagccatcttctacagggtggctatccactagtacccataggcaatgatgccttaaaatacaggaaaagggtagcatgccatatggcataaaatrggttaataaacatactctccaagaacattacaaaatgataagaaatagataataaaaaaagagcaaagtgtataaataagaaacttataaaagagaaaaggcaaatagtcaatatcacatcaagggaagttcaatttcactagtggttagagaaataaaagctcwagatatcattttgcagctatcagatcagtaaacaattttaaaattttgttttcattgagcactggcacttgtgtgtgcccctgtgtgtgggaaaacacactttgaacactgcagacagttgtgtgaattactataacagttttgggacttaattggcaaatattttcaaaattaattatgttttcattgagtaatccaacttcagggaagatagaagatattctagaaaaataagggtatgaatatttaaggatgtatccagtgatacagcatttagtagataaaatctggaaaaatatctaaatgcttaacaagaagacattgaataaatttatagagtattaaataaattgaaacattatgccactttgacaaatgtgactttatgtctattcacctggaagaatgttcattatcctttggcagctggaaaaataattatagtggcttaaaagtacatacttcatgttatatgccaggcactattccaagtattttacatatattgcttcattaagttctcacagtatcaatatacagttgagaaaactgaagcagacagatataggttaaatgacttgtccaaggtctcacaaatgcttaggggtagaactaggacttaaactctgatgggctggctcygaagttgccattcttaatgactatggtatactctttttcaacatatggagtaatgggtattgtaaaattctatttttgtataaaaacaaaataaaaaataaccatatatatgtgtatgtatgttaacaagtgatcttcttaataagagccttgatttaaaaaaaaaaaagtataggccatgcgcggtggctcatgcctgtaatcccagcactttgggaggctgaggtgggcagatcacctgaggttaggagttcaagaccagcctggccaacatggtgaaacctgtctctactaaaaatgcaaaaattagccaggtgtggtggcgtgcgcctgtagtcccagctactcgggaggctgaggcaggagaattgcttcaacctgggaggcggaggttgcagtgagccgagatcgtgccactgcactccagcctgcaacagagtgagactccaactcagaaaaaaaaaaaaaaaaaaaaaaaagagtataagcaattctctgagttttttacacttagaccggacaactataacaggagcttccttaaagattccagaaaattccaagatctgtgattctgtgagttccaaattgatttgatttttcctcaatgtctttttttggaaaaaaaacaaaaagatgtacatgtgttgagagaattttctgtccactatgagaagtggaggggagtaatggcaaagattttattttaaatatgaagtcattaatataaaagacagaaaagtgatgaaaactatatgtatatttgagctttccaagaagggcttgggtcttatttttgatatccagacatctgtgaggaagatttcccaaatgagtaggtgctgggttttctgctgtttatttgttcctggcaaagccaagtgtgaagagacagcatctgggacagggagtattgtaaggacgtgtttgagtattgtggagtaggatagaacatgcacccagaagagggaggagggatgatgaaattacacagtggattttgtctttctgctggtctttctattggtagtgccaaattgatacaaaacatttataatagtcacaattggcccatcttgatgcctattaatagcagcattgattgatcctagacaaactagaactcttctcactttgaaactcacagagtttcaaaacctgaaattctgaaacccttgtgttaccacaacctcttagcctttcatctcattgcctctgcacatctcctttcatccatcggctcttacccagtctccttagccttctctttgtcaatcgagtgtttcatccaaactctactgtcactctaggttcactttgtctcctcccaggacttcccgaagatgatcctttcatagtttcatcttgcctctattacttcttattttcagtctacttttccagcgtatctcactctatcgtcccttaaatgctgatattgatgagcttccattttctgttcttcacaacattcagtgttgtttctgtttttactgctatctcagttaaggatgtaattattttgcccataagtttttacccatatcctcttctctccatcccttccaattctttgttactactactactactactactactacttctactactactactactaccactaccactatctctctctctctctgtctctctcttgctaatcattattgccccattactcaacatgagcagcagctcatcatgaaatctaagctctttattctggcactcaatatcctccaatagtaagccccagactttcttcctcaccttattttctacttgctcaagttgcatcagatttgtagcctttccactagcatgccccacatattcctgctcccatgtcttagaccttcttgtctggtgtgcacttgtcaaagttttaattatccttcagtacctactgaaatcttcctccatctttcagatgcttctagtcagaaataatcattttctacttaattttcacgttacatttctacttctgctagtgcttacttcattactgttcttgctttgcagctattttatgcacatgttactctcttccatttactctgcaccttcttcaaggcaggtagacatttattytttaatttagagatacagagcaagtgtaagtaattccaacacgcattggtgataacctctatttacattttaacgtgtatccttgcaggctttctttttgcctacatatagttttcttcatttaaaaaaataaaatgatattaccctatacatattctttcataactggattttagtatgtaatgagacataagaattcaatggtaggtaaatgagttatattagaaacagactgcctgaattcaaatatctgctttattgcttactagctaggtaaacttaggcataatatttaacctttttgtacttcagtttcctaatcagtaaaatatagataagaataatacttatctcttatgcttatggtaaggattaataacataatccacataaaatatgycatagtgtattgaacataataagcacataataaatatgtgttacttgcaactattataaaaatatatctgaacatagctttaagaccgtatgtatggtcttgatgagtggttttcaactggtggtgatttgtccccttggggaactttgggcatgtctagagacatttttagctgccacaatgggggaaggagtagagctatggtgtctagtgtatagaagcttgagctactgctacacatcctgcaatgcacaggacagccctccactctcacagcaaggaacaatctataatattttataatcaatagtggaatggctgagaagccacaatcaagggcatctagggcctcacttggcacatacaagatagcggagaagacagacatggctggagtggctgggatttccctctatgttgccttttttcataggaagctggcttgggcttatttgcrtggtggcagaagatttcccagcagtaatagaggacaagccccaatgtgcaaaaacttttgtatcctctgcttaggtcatattttctaatgtcccattggcaaaagcaagttctatggccaagcccagtttcagggggtagaaaaaagagattccactttttaatcagagctgcaatccattgtggcttaaaagaaaatcttccacatagggtgggcatactgtcaactgaggctctttttgctaaactgccttccagggaggcaactggactcagtcagcaatggtcacctgtatttcgctatctcacaaatacttctaagctgctggtaaaaagaaattggcacttaaagtctttgatcagtcaggtgagagtaaaaggacagggcggaggcagcacaaaatagatactttatgtcaatccatttttgatatctccactcagaagagcccagattcacatgttaaatagcctgatgacatctcaacttggatgccacacagtacctaaaacagaacatgtaaaaatatttaccttccctcacaaaaaatgcctacgcttcccatttcagttaatggggccaccattatctaatcactggarcctgaaaaccaggtctcctcctggaggcttcttcccgctcacttcctttcttaatgtcgtcaagccctccattactttacctcctaaaggtctctcatattgatttcatacttctccattcccatcaccacaggattcatttagactcagaattccttggttggatcattacaatatcctttgtgtccactgtcaactcttctactctaatgcctccagagttatcttccaaaaataaacaatttcaatttcatgacaaaaatcccttgaattttatgtcctctgtggaatctctgtgtccttcagggattatgttcaaatgccctaacagggtattcatgtccctgctctgggaggaatgataattcctcggcctaccttacaagattgtttggaaaaacaaatgagatactgtctgtatgttgaatgaatgaacaaggatatgaatcaataagtgaatacaaagaaagtacttctgtgtggctgcagtaaaggatctggaagttgtaggggaaagatgcatcttgaaggatagtctggggcttgatcataaatggccttgcgtatgaggctgagaagacaagcctttattctgtaaaaaattagaagcatatgatggcctctgatacttcacaaaatctctagaaaaaggtatataaaaccccatttatcaggctgggagaggtggctcacacctgtaatcccagtattttgggaagctgaggtgggcagatcacttgaggtcaggagtttgagaccagcctggccaacatagtgaaaccccgtctctactaaaaatacaaaaattagctgggcatggtggcacacacctgtagtttcagctactcaggaggctgagtcaggagaatcatttgaacccaggagccggaggttgcagtgagctgagatagagccactgcacgccagcctgggtgacagagcaagactccatctcaaaaacaaaacaaaacaaaacaaaacacacaaaaaaatcctttttatcatagaattcaatatcaaaaactattaatgtgaatacttttgcccacattgaactataatttcctcatgaaacttaataccccaagtagcctgaattctataacgtaattttcacaaagggtttcaattcaccagataatttttcaagcccctctcatgcattcatttatttggacacgacctttgacctgaatcaaaaaatgattccagaaacatttctgaagcatattgatgacagactcaattggaacagaatccaaaatggtattggcgtactggcattaaggtgtaatatttctgttaggccttcctgtcttcagctgtgctttggacaaacccttcttttagacaggatttgttcttcacaaagacttattgcttwttatccagtaccctgtgatccctgaggttattgaaaattgatttgttccagggcctttccaaggtgctggccactgaaatccttgaccatcaaatggagggaattccaaataaataaacaaatacataaataataaacgagccttctttgtttcaagtctctgacttccactatgccgcaaaacctctccgtgtgcatttgctgtgtcagccaaaagtgaaaagacagaatgggaattgaggaaggccattaggagctgaagcagcaggaatcagatacggagagcccccggccctgctgtgagcatgaaggcagggacggtctgtggcaggaggggagctaagcacttttttctttgcttcttggttaacaacgtggtcatttcataagcgaaaggctccatgtggactgcttaacctgagctcatagttcagttcttaaaattccaagtccctttaactgaaaggttcaactagaaccaatgattatataaaatggttatcattaggatggggcttttcacactttgaataaaattaagttctattttccttgaaggatttttgcatcctgtacaggaggatcatctgtaacattaaattgtttttgagtttttatgctaacagtgaaaaagatctaaatggattagtctttcctctcctatgctaatccaggaagcattcttttgatacccacctaataaagacaatctctaaaaccaaataataggctatgaaatgtattgtgagttcttatttcattcaagacagagcttacctttaagtctccagctgagacagttggttttatctttctgaaagcagtttggtcaagtgtttcaagtaaatcaaaagatcggttaatcaattccttagcgaattggattagacactctcatttcaaatggcagttttatgcttactcattgtcttgaataatcttaaatactttatgctatcttcctgctccattatttatgtaatcactggcccttagtattctgctttagatcatataaaatcacttacagatattttcatcacgcacacagaagctctttatgtcataatccaatttgatgggtctttccccctgcattctctcatgtgggaattcttgttttaactttattgatctgtctggtttattgttgggccacatggttccacatcacacgggtaggatggagaggtacagtgaatagccgtagatgttttgaggattctcttgctagtagacacaattaacttcatctctttcaagctgtcagttataaagccactgtttgcttggaatatatttggaatttacgtcatgttccccaaagctaactgcctcctgtatctgtagttgacagtttctactttatgcaagttattaatacaaaagcagcaatagcaacagcttccatttattgagtcttcttaagtgccagtctctgcataagtgctttacgggcattattttattaatcctttggtattctggggaagtatgtactattattacccatagtctttaggtgagaaaagagaggctgacagaagaaacccagtgcttgtgtggatggagggaaaaatatgatcttctgccagctctcatttagagcctttgcacatctgtgacagatgtaaggcagatgttattgactctagtctagagatgaagtttgtcagatgaaggagtaagttatttgatgacattcacccaactagtaagttacagtgatagattttaaagcaaagtctttccaatttaaagcttgaattgttgcagtttgggacaaatcctgagagaatttgtttaggtaattaaaaaaaaaatcaaagagattgttgggccacactaacagtgccccctgatgtaggctatcacagatttattatagcatgggctagtatatttttgtttttctgtagcaataccttgtggcctttggagtgattcaaattagaagatgaatgggtgtggtggcagtggacccagaatattatgaaaatgcaagacaaacaagatgagagtgaaatcatcacagaatatagcctgagtagggcaaatgtactagagcaaattagaaggggattcatatgcaagggctaaggggaagaattcatcaattactcaacctttgaactccaaagaagtagttcagtaggtgtggaagagctggagatgcagatgtagataaggagattgtgatcatgtcagtggaccagtgagtttagaaatggggatggagtggactgaagtatgaaccacaaaggagtggtagggagggaggaattctaaagtctgagggttattctccactgctcctcagagatgagcctaccacatcagtcaagccaggctactcattactcaaccccccagccctctgccctgtgtccccagcccagctttccaggcacaagataatacgccaaacatacctaatgcatgaagcctgccagtgtttatgttgttctgcccaccttgaaagccatctcctcacctgtaaaccccgtatgtctggcacttagttcattgcttagcattttgttggcctcaatttgtgtctttagaataaatgaatgaaataatacattactagcaaatgtttgaatgaatcctattcttattcccaaaaagtaatccaattttttagtgtaatgttagatatataaggatgaaaaacgtgatttgatcaactattttcttggttaaaggaatgacattaatattctgcaaaaatgtactgtaagtagcaatatcatttggaaacctatttttatgatcagaaaagtggattatttctctaaaatgaataagccagtatctgcattatcaaggtatatcattctagtgaaaaatttagtatttttaactgttatatattaatgggcattgtggaaatgcacaataaacaaggtgatggtatattgtaaaaaaaaaatacctcatttaataactactgcctttttagtgcttactatgagccaggaactatgcttagkgttttatatatttatactaatttgctgacagttttctcaatagctcagaaggtgtccttagtattcccagttcacagagaaagacactgagatttagagatattatcttagtaaataagaagcctggaggttgaaccttctgtctgttcctgaagaacatgctttaaccactaggttatattcttttctattggaaggagtgtttggttgagcccacattgcatctacctttataaccaagcacatttgtgtacacctgagaagacaatgggctagacaggctgttagtttctttttgcatgagtacatttggaggtgaggaggaagagaaagtgggcctggggagtacaacatgatggcttttgtgaaacatctaccttcatgctctgccccatctgagcccattggaaagcaccatttctaagtaatggtgtggcaaagctgagagggaaagtgtggaaccagagccttcttccttgaacacacctagaggtccatggttttgtgagcactgagatacatcatacttggcatgactattctatatgggagagggggcggtatcagcagctatggtagcagcaagggaccctcctcaaatggctttgctgtctgtgaacactgaccaagagagctggaatgggagaagtagaccctgacaagtaccatgtgatgatgagaactaacagagccgtttgtgagctcacataagatacttcatggggcccaccaaacatatctgagtgagactctgaggaggtgggggtggggttgtttgcaggtcctgcctgaacagatggggcaggagacagtgaaatttgatttattacagctactgtgatcccatctgttgatgaagcccagagaaactcaaccatcccagactaaagttactcaatcccccattgctaacagaggagatgcaactacttagactgcgtgttcagtctgaaatagtatggggaatagacatcttactgttaattgtgatataggcaaaatagcattttgtacttcataatgatacccaggatagcataacatttaaattatttttttctaattttctatgccatctcttttatttctcactgcttaattacggggcagccccattttataggcaaaagagtttctcaaattaaaaataatattaacaacagtaataacaacaattaagttccaaagcattatactaagcaagttatgtgcactactatttaatccttaaaattactctgtaaaatgagtattggtgttattttcatattatggatgaataaattaaggctcaaaaaagttaattaacttaaggtcacacagctaacaaatttctgagtcagggcttcagtccatattactcccacctaaaagtacatacttccagccacttactattctggtggggggagaactaaaattctgattttgtgattatctgtgaaataactttttggtctgttttttaccagcaagggagtttttcattgcatatgaggtagacattctcttaaataactttttttgtgtgatcttttcattaatatgtatcaaaaagaagcatatgattttcagatggattcatttctcttttccactgctttcattaatttgaatatcaaagaatttgcttgtttatacacactcaagaaggagcactccaaaaggagacaaaagcaactctctgaaaaggttttagcatgtttttatgagtaaaaaatagtttgtgtgaatcattcagggtttgtgtgcattacacacaataaactaaatgagtataacaagttaaatttatgaattaaggatctggtaattcaccagccacctgtctgtaaaaggcttttgaatttggtgtatataaaatgcttcctataattacatggagggaataggcattatggctgtaaagtaatgagattaaaaatatgcaagaatttacatatttgcaaaccatatatctgataagaggttaatatccaaaatatataaggaactcaagcaactcaatagcaaaaccacaaataatcaaattaaaaaatgggcaaagggcctgaataaacatttttcaaaggaagatttacaaatggccatcaggtatatgacaaaatgctgaatatcactgatcagcaaagcaaagagaattaaaaccacaatgaagtatcacctcacacctgttaggatggcaattatcaaaaagacaagataacgagtgctggcatggatgtggagaaaagggaacccttgcacaccattaatgagaatgtaaattagtacagccattatggaaaacagtatgaaggttgctttaaaaattatctaaaaatagaactacaatattatccaggaatcccactactgggtatatacccgaaggaattgaaataagtatgttgaaaagatacctgtattttcatgttcattgcagcatgattcacaatagctaagatatggaatcaacctaagttatcatcaatggatgaatggataaagaaaatcagttatatatacatgatggcctactattcagccttaataaaagaaggaaatcctgtcattcgcaacaagatggatgaacctggaggatattatgttgagtgaaataagccagaaacagaaagacaaataccaaatgatttcacttatacgtggagtgtcaaatagttgaattcagaaaaacagagtaaaatggtgtttaccagaggctaggagtaggaaaattagggagatgcttgtcaaagaacacaaaatttcagttacacaggaggaataagttcaagaaatctattgtacgtcatagtgactacagttaacatattgtatatttgaaaattgattagaaagtaaatttcatatgttttcactacaaaaaatattgatatgtgaggtaatgcatatgttaattatcttaatttagccatttctccatatatacatataacaaaacaccatgctgttcaccatacatraatatgtataacttttacttgtcaattaaaatagaggctgagtattaaaaatatatacaataatttagataattaacacattattttttaatgcattaaaaataatgagtgtaagctttacactctgtagcaagatacagggattttatacatttaaatgtgtgtttttctctctaaagttgtcactttagaatttctatatataacttattccagtgatgatgccatttattaaaacactttcaaaatttccctttgtgaattttccccagagccactttataaagtacaaaaatgttttatcaatttataatcactccctcctttttttaacaaaaaaagtggtaattcttcattctgtaattcatcttatttaccaaaccaaactctgaactgcttttgaccattttctcaaactaatcctagtgtctcagtatgaagacttgtcacctttcaagaaatccaaaggactgtggaggaagcccccagaatacttaaataattaacttcccagtgtggattataccctgattgggcctgcatgtctttgaggtgatagattctgctctgcyctttacaaaagcagcattactctgtagtctcacatatacagattgaagatctcattttgccattctaatatcttgaaattataagatatgaaatatatctaattgcctctgtgaaaacagaggcaaatttctaggcagtgtgaggtgttcttctgagctcttcatcccattaactttcatttatgatattaaaaaaacatgttaattaagatataacttgcaaaatgctctgcagtttgtgtgtgtgtgtgagaaagagagggactttcaggaattgaagattttctctgcatgatacacttctgacagctgactaaaaagcagctcagtcagacatctttattatggagcacaagtcacattttaaacaactgaagcttattattttgggattttcttctggatttgccatcacttttaatggcaaaaagygcaattacatttgcaccaacctagtaagattcactcatttgattcctgaggctcccagagtcgtttagagttaattgtccctagtctgtattccctagacttgttagagactattttcttctcaagatcaaggaagatgttgtatttatgcagggtccttaaaacatagttattgtaactggcacatagcagatacaggttaatatttatggaataaatgaacaaataattggtcaaggtctctggaaatcagtttgaactgctttaatatgataacctctacagttcctctaaaatctgaacgaaattttggggtgagaaaatcaagaaataactatctagctggcttgagtctagaatcttcaggagagataagaattatcatgctatttggagttgctttgattacttgtgaacagctgcattttgttcatcaggtgatataattgcataggtaaaggctaaagtagccaaaattgaaaaatggttaatgtatgcagtttctagctgtcaatcaaactctgtcttttgcaagtatttctggggcattcacagttaatgacaaaatgtggtgtgtgtgtgtgtgtgtgtgtgtgtgtgtgtgtgtgtgtatgttttccttcacaaacctgagcatttcatgcaaatatctgtcaaggatcacattaaacaacattaaccacctcaatgcaagctgaaaaatcccttcaaacttacagatattctcagaaagaaggtaatttttaaaaatacatgttttcttttcaaataataattgtgcaaatggggctcattgattgcctggattttagtttagccctcattagrctacatacaggctaatattcctttaatattggtagacctgagttttgcagaataagcaaaccttttgataggttttatacttaaacatagcaaaaaaattattttaatgctaggttataggcataatcctcacatattttagtctgtattattttatgcagtgatttaaactgctacatttagggaacatgtttagaacatcttatgacacattgtaactgcattgagagcactaactcctgaaatgtagagaggaaaggcaactaaaattacctgaaatttgttttttgtctaaatattctttcccagaagagactctcaaatgaaaactgatccaatagataacaattataaggtaaggcaaaaataataggctctatgttatcatatggtgtaagtgcttgtgttgtctttgggcttgtgtttggaaatatggtttactctgggtcattcatttatcattgtgtccaccagwtttgtgtaatcctcatgatgatgataccttaatttgctacagagtcttaggtcatgctcaaagttcagttttgggagcagcgggaatgggcttggcttgataaagatcacatgatctttgtgtgttctcagtcaactgtttttcatatatcacaaggggtgagaagcctgacataaactttctttaacacagctagagtgagatatttgaggagattatgttttctaaaacatataaagtgtttattaagactttcagaaagtgtaaaagctgctaggtaatgcacgaggcacttccttgaactgtatacttatttcttttcatttaaaagaaattctaattttgtgaactttgttcttctggaccaagctgaaggtggaagaaatgatgggggctgccccatgcagtcattcagggtctcacrgtgaaggtgatatggcatcctcacatgtagtttcacagatcctttatgtgtcaatcagtgtccagctggcgcttaagcagagagtggagaggttgtgagtacccttctagtggtggcacttccacccacatgctattggccaagattcagtcacataactatgcttacatgcaagggagaaggaggagaaaataaaatattttactagaaagccacttctctaattcagctcctcaacacagaatagacattctctggtagaacactagctgtttcttccacactcctcacgtattaagctccatccaccctgacttttaccctgatcctggcatatttacatctcagggcctttgtctatgttgttcctcttctaggaaaatttctgctgcccttaacttgtctggtcatttttcttttcaatcttaaggtttttcttaaacactatccccatcaaagacacctttcttaatcacctgtcaaaagtaagattgtcccaagtaccttgttggttttctttacagcgcttaccataattggccatcatttgatctgtttacttccttttgtttgtttctcccactagagtgtaagctcatgaaactaggtatatgattgtcttttacactattgaattcctaatgcttgtcacagtgcttgacatatagtagatgcttaacaaatattttctaaattaaagcagaaggctctgggttatgagtaaataattgtagtattaaactaaaacaccattaccattaatataaatttatagatctatgattctatagacaggtttgacaaaacacagtcagtgcatcattattaccctgtactgacactttatattaatccaactcattcttgaattattttaaagtaactattccaattagccattgctgtatagtacattacctgaaaacttagtggcttaaaacagcaacaataattttatcacctcatggattttgtggggcaagaattcagaaagtgcttggctaaacctggctcagagtttctcatgggattaatatttatadaatgaatgaatgaatgaatgaatgaatagggttatggaatgaatatttatggaatgaatgaatgaatgaatggggttatggtcaaatatttgctggagctagaccaacagtggtgccagagcaaacacagaagctgcaggtttccaaagatcaagtattcctgtgagccagtcagaagcacattgacatttaggacttaaccttggaagcagggcatccattttgctgtatgccattggttgaaacagtcacaaaagccctcctggtccaagcggagcagacatagaccccaattctgggtaggaggtgcatcttcgtctgttttctgttactataactgaatatctgagactgagtaatttataaaaaatgtatttcttacagttctggaggctgggaggtctaagattgagggagcgcatctgatgagggccttctttccgatggggactctgcagagttttgaggtcgctcagggagtctcatggaaagggggctcaggagagagggcaaaactgggttttataacagatctactctcgtgataaccaacccattctcatgataattgattaatcaatgaatggactaatccatgagggctctgcctttgagaccaaatcacctcccaaaggtcctgcctctcaacacgtctacactggggaccaactttttaagacatgaacttttaggggacacaatcaaaccatatcaagaaatatcaaaggatttgtgcatatatttttaaactgtcatatcaaccaggagggaatgaatccttggacttgcagagcattttaaggacttattattaccaggctttctctctcaccctacttttttatacaggccagtaaggaattccatagcacttaacctcctccatgcacagaacgctctttaagtagctgaggtatgtatgtattcagaacttcttatttgaaaaatgcctcctctgcagggtattgtagatgtcatattatgagaaccctgacattgaatcgagcactcacttcytttcaaacctttggaaataggctgtattgattcttaacatttctctggcacatttgtggaaaacagcttttctcagaataattggtcttggtttcccagccttaatattctacataacaaattctctgttttcattaaggcattttatttataacaaatgggtcaaaaatattctttaccctggtcacaattctgtaggaagaaattgtcaagcattctgggatgctgctctgtaaccatctcagtaaagtcttctcatgagatggtttaaaaggtggataatttgtgttagagaactcacaaactgttagattactccaagttccaaaatacgcaggaaatccttaatcaaatgtgtaacataatcccactattatttttactatgagactttatttatagttagaaatatactgttccaagtgtgaccttaagcaaggattcattgacttaaaaaaaactttttatttcaaagcagttttatttttacagaaaagttgcaagactattacagggaacacttgtataaccctcacctaacttcccctattgttgacattactatggtacttttgtcccaattcatgaaccaatattgatacacttattaactaaaatccacacttaattcagattttcttaatttttatctgtctgctttctgtaccaggatcccactcaggataccacattgcatttacttctcatgtttccctagactcctgtagactgttacagcttttcagatattccttatttttgatgaccttgacggttttgaggaatgctggtcagatatttcatataatgtttttcaatttgggtttgtctgatattttctcatgagtawcaggacttatggatttgggggatgaaaatagtctgttctacccatgtctcatatcaagagcacatactatcaatgtgacttatcagtattgatgttaaccttgatcacctggctgagatagtatgtgtcagatttctccactgtagcaaattacttttgtccctacccccttccatactttggaaggaattcaccatgcacatccccctcttaaggaatggggagtcatgctccaccttcatggggtgggggtgggggagtatcaatttaagttatttggaattcttctgtacaggagattcatttcttctccctcatttatttacttaatcatttatgtcagtatggactcatggatgcttattatatactttaggttataatcctatactactatattttgttgctcaagttgttccatccttggccattgggagtgctttcagttggatcctgggctcctttgacatatccccatcatagtgattttctttgggcacttccttactttctggcactaaaagrtgttccaaactcatcttgtatattttattcccctgacctagaatcagccattttttcaaggattcctggtcctttaattggaaaatyatattagaaaccaagaactagctactggatgtgcttgttgctcctggggtgggttcattgaatttccccagcctaccatttataaacacttacctaccatttattgaagagctactctgagctagacattttagttacacaagatgaaaaaattatcaccctgcatgatggtgttccagatgagagaattctcatatgttaaatgtcttgcctgagatagagagctagtaaatggcaaagctactattcaagctttgttctctgtaatggtaggacagtgttcatttgcaatgatgcctcaactctgttgcgaggtcataaatttttttcctgctggtagtcaactattttataggttcaaactgtaactgaacaatataatatttctgtctcagtacaagtmaccaaaaaaaaaagactcaaaggcaggacctatatttagtgagcaaataacattacttcatataatatcaccatcattatcttggtctgctttaggataggatttgaggaagtacggtcaatcagaggagacatttggctcttgtggccttgggctgtgaattttgtaaaacaaatatggttcttgccctcaagaatattgtattgaataggatggttaaaaaatatatataatcaatagaaattaatgattcattaatagctaaaggactttaataagagggtatgcatgagtgagtcttaggaagttagaggatgagtaacatgaagccagaaagaactcttgaaagaacagaggaaaagtcaaatgctttttattctgccgagagaggtcacaatccacctttcaaaactttgtctggagtgcagataaaaagtcttccctggacttccaaaccctttggcactaacagattcctttctttcctctaggtggatgctgagaacagcaaagatggacagggtagaccaagcattgttctgttagggagttgagtgttgtgactaagagaacaggctttaagaacagaaaagccatgtgtttaaatcctaggcctggcacttatgagctgtatgaccttgagtagtttccttaaccttccagagttttagtttgtttattgtttaagtgaggaataacagtaccttcttcatagggctgttgtgagaattatttgaggcaaagcatatgcttaacataatgctaaatgctgagaaggtactcagttattattaaaaggtgtctaaagtacacattagcccacaaaagcctattcagaaaataatatggttgatccactattataagggcaataattgttatattaatgccaaacatttattgagcaaataccatgtacaagtccttattctaggaccttacatatattaactgaattaattatactaatgacattactgaatccaaccagtctttataaattatttctagggaaaatacttctcaaattttgtatgtgggagagaagaaagataacactccagtgtcagtagagtcatggctgtagagacatagccagtgtattgatggaagcccgaggggaagwggacagagcagacaagtcccggtaggggcttaaaaaagcagtatttgggagcagggttttcattcatcactgaagagctttggaaagacctggatttatgaatacattttcaatattttttttctcaagtcttgctaaccaggcctggtagggtgggaaggggtagaatttgagattgctctaatgctgaaacatttggtatggctgaaacttcatgaactgagagtaggaaaaatgctcttatttttcaaggtgcccataggcttagtataaattaaaacctagcctccctgagtctatgatcccttccccaaacaccgagagacaaatgtgctcaagacttactaattaggtggaaccatctaatgatttcattgctgttgcagcttccactaagagagtgtttgattcatgtaaggcaatcaaaactataatccactgctagcaaatgaagacagacaagaacgttacttctagtgagtgtagtatatcaactttgcttattatgcacaggatgacaggggataggaaaagggctctgtctgctgaaagactgcttagaattactgtccattatccagggcaaatgttttacaaaacaaaacagtgacttctgcttagggtatctttgggaactgaggacagaagaggaaattgactactggaaagaattcccctggtggcatttaagatgatctagccttccctagtggctgttgttattttccatatggatgctcttcaggaggaaagcaagaaaacaaaccagcatatttgtttaggaaaaaaaaaagctgtgatgctgcaaaactcatattaaaatctacagcagcctggctcctgataacctgtgagttgctgggcgtaaccacctttttaaatcctgtaatagagcaacaaccaacatgttagatataatgattttcattttagagatgaaaaaattaaggctgatagaggtaaagcaactttcccaagatcaagtaatagagctggatttcaacctacacatcccctctctagagcccatgattagaatcactgtgttgcaggtctgtgtctacaatggtaacgttgtgacataaccgagcagtatcagtggtgtcctccctggaaaggcctggccatcccagtgatacgtttctgagttagaaggcatcttggacactccacaggttcttaacctgcctgcacattggaattacctggaaaactggaaaataaacttatacctgaatcccactctcagaattttggatttgactgatctgggtggagtattgttggtgggaaaggcaggtatttaaaagttccctagttggttccaatatgattcaaagttgagaaccactgaccagccctctggactggcaacacttacgtccctaactgtcagcatcagcatcatctggaaatttgtcagaaatgcagactgccaggcttcacctcaggtgatttgtatgcacactacagtttgagagaatggcaggcagtgctcagctaacccctaagggattaggaggacttagggaaagtgggaagggaagaacagagggaattctgatgttttctcatgattaacagggcttatgggttttggggaggaaaatagtgctgttctacccatatcgtatcaagagtacatactatcaatgtgacttatmastattgatgttaaccttgatcacctggctgagatagtgtgtgtcagatttctccactgtagcaaattacttttgtccctacccccttccgtactttggaaggaattcactatgcacattcctcacttaaggaatggggagacatgctccgacttcatggggtcaggggkactatcaatttaakttatttggaattcttctgtacaggagattcatttcttctccctcatktatttacttagtcatttatgtcagtatggactcgtagatgtttattatatactttgggttataatccaatactactatattttgctcaaattgttccagccttggccattgggaactctttcagttggatcctgggctcctttgacatattcctatcatagggaatatgagaataacatcgcaaaaaaaccagaaaaggaagaatggcacataaaggaactcgaagcaggtcttggtggctgaagcagagattaccaasagattattagatcaaccttttcatacagacgagaaatgcttctttctaggactaaggaytgagcactggctacttcctctgtctgcctggttcatatcttccacycgaagtgataccttctcaataacggcctaccctggtttcctcgtttaaatcatgatctttcctctaaacttgcactctcagacttcaatatttgctccattttttcccctcaacatttgtaaccttctaatatgctaaatagtgtatttattttgtctttctttactgcacatccccaccctagaatgtaaattcaacgagcgcacagattttgtttttgttctrcattgtatcctccagcactaacaacagtatctgacacttcaaagaggtgcttcacatttatttgctgagttaaaatgaattaatcaatttacaaaaatttgggttagtttatgcttactttatctagagtgggattgtgaaatatcagtcaaaagccttttcaggagtttaaatgagtgaagaacaagatcaggtttgattttagaaagaccatctggctgtgtgtatctagtggacccaggaatggggaggccgagggctgcactaaacgcagggtaaggccagtttggtgacaatgtcagcctgccctaagagagcagtggctgaagaagatagcatgcatttgaggtcttcttaggaagtagcatcagcaggggacagctcagggagtaaggaagagaggagtcattctaggtttctgktttaggcaaccagaaggatggaaagccatctgtaggcagtgctgaggwagaacagatatttggagggaaaaagttaagctgttttgaagtattaaaaattgcagactgatgtaacctggtggaaatgtagatttcacattcattaaacaatgacctattacccttctggcactatagtaagccccaacgagtaagtggtagtcattcaatgaagtacccactaygtgccagacatagtgtcagctccagtggggaatgagacaggtgtgtggattcatcctccttgcacttgcagaacttggagaaacagaaaaaatcatgtgagagcaatgggagtgagaaggagagagagagagagagagagagagacagacagagatagtacaagattactttcagctagggattcaggggaatgcagctttctggtaatgatagcatttacagtggagcttaaaaagaaatataaagtttagaaacagaacaaaggaaatcaaaagcatgaaggcaaacaatctaaatactatgtcaggaatagtgaataatttgggttgccaggaattaggaacatagagcccagggtagggtgtgtaatgagaggcaaacttgtaaacacaaatggaaatcgtagaaagccaggtgaaggaatttcaactgtgagattctgtaagaggttagcttggaacagaatagaaatacagcaactgtctrttcagtgtatctatgaatcatttttgaatgggggtaatagttggaacgtggtgtttggagaagatacacatgatttcagtatggacaatgggatagagagagaagaagctgggagatgaggctattttagtagtgtattagttagatagcctatttactgtgtcagatatccctacagtctagcgtcaatactgtaaatgtttgcctctcatttttgcaaatccactgcagatgtttctggttgggtggctcatttgtacagacagctctcctccaaattgtgactcaagccctggtcttccttatgtgttgcggcttagccctcctctaggtctttggagtctctcctccatccagctcacaatttggaaaagagaaaggaaggtattctcaaaaggattctatggaccatccagaaagagcatataacacttctgcatgcattccattatagccagaaccaaatcatgtggcttcagctaactgcaaggaaggctgggacgtgtagtctagctgtgtgcccaggaagagaagggaactgatttggtgtataacaaatcacgctgtgccacaagtaatgaagttgagagagaaagattaactgagggaatagagaggaaragatgcattcagtagatgctgggcaagtggaattggcagtaaaattgctattgattgggcatgggatgtagggtaggcaaataatacatttttcaaataaaattgctgccaaggaaatgatatttacatcatatgccatggaaaacatatgttaatatttcccagatcttagattgtcattatgggctttgtagttcagaagaaaacaaaggaaaatattgtagcaactcaggagaagattcacagagaagtttagaagttcttgcatccatatgaaagctttttattctcgcatgttgtattaaagaaaataatttcaccattcatggttgctattcatgaaaactttaagaaagcatgtgtccaratttgtgatgtttasgaattcttaactggtttaaccaagtagggtgagaatacacaaactcatataactaccctgacaaatgcagaaaatcaaaggtagctactattattatgcagataaaacaaagacaattggagaggaatgggtctgggttagatgatctgagcacaaagtaataaatcatggcatgtttgtatagcatggtgatactttaaaactctaatttttgctgtgttatttctcaaaggaacttccaactgaattgtagctcaccaatacaggattctgggttgaaatttgttttgcagccaatctattgcacaaattgaggcagctgtgcacagcatgtgttttgtttcaatgactatatagtgaggggtgttatgcaaagggccgctaatcagggaaaagactctcttcaattggcaacttttcagggctacatgtaaaggagaatttacatgtttcattaaaagtgaaccatcctattggtttgtatgcaacctagatcatttaattttatgctaaaaaaaaaaagctcagacgttgtttgcagtcctatgtcttccctcagttcattagcttgaataagttcccttggtggagaaattgattgtagaacagtgggtttcttggggttggtcattgctgaatacctagataagctcagtaagattaggcttgtcttttcgtatgggctttgatgatggcaatctactatattctctgrttaaaatccttgtcacacttgacttttgttttgcttaatttttacaatgtgttcagctagaaaaataaaagtagatcgatctatttcacttactctaagttaagttgttccttacacggatttccatgccttggctcatgtttgcgtatctgcactgaagcagccagtgctaatctatatgaatctgttttatggagacagaagaagatgaagccatgaatattaatatcctattatcatgtgatgatattccaagcacatataccataaaaatcacaaaatgagaaaggcaaggatgccaggatattctatataattcctgtcccaaagaaatgaagccaggaaagcgcatgaaacaaagtatgactcaggccttgccatagtaaaaaactatggctccgaggtttcaattctgaattcaattgtgaagtcctagggggtataccgatgcatcaggaaaagtgaacatggcatccagtgtctttgtggatcaataacatgcaatacattaaattgatggtttgtgaatgctatatatatttcagtttaggtgattagctatcacaaaatcaagtatgacattgggatgtagcatttttcctcagttattagaaatagatctaatagataagcatggaattttggctctcataaatcatttaaactcaccaatttttccctaaaagaaaaagtgaggttcatagaggtaaagcagcttacccaacatgacccagctaattagtgacttgttttgccacattacatgataacccatttgcagcaacaggtccacaaatattcttccctttgaataagcatcaaggctctgtccattcttaagtaaaacatttctctgagaaaatggggcagtgcaaggcataggagaaacaggtttccttcctccaactatcctttctctaactatgactttgtgctcctgttctctttggttgctatgttggtcattcattcatttattacccactgagcatcactatgtggtaggttttctgccaggtttaacagaacaccgagagaatggtgtatgagtatgtttgtatactggatgagctaagtattgcactaattatcaagtggttacccagaaaaataatttcaaataatagaaacatgtttggtgcaatgataacaaaaggaagaactacagatacaagtttatgaagtgtcattaaaacaacccccagcaggatctgattctaaagtgcagtgttttactttccttcccaagcaaaagaaattaagggagatcacttactgtgagccacagaatttgaaccaaacattaagcatctcctaaaaataaattttcatggacaacagttgcgggaaactgctcaaattagtgctataaaaattaaggtttatgttaagagctggagaacagataaaattcttaaataatccagtgtttaagagaagtatatcttttatatttttgtttgkgttgaaaactgaatttttcaagtattgtaaataagcatttccttgtatggattttcagtttggtgacttgttaagagtcatatgcctgagatcacagataatagcctcacatcaaaataaatttgaattctgcttcattttaaaatatgtttgatttgttcaccacaccattggtctttttataaaatagctttattgtctttggtagagtaagcataatattactatattcattctctgattagcacaatgaacattccaccagctttgtactaaattataagccctggtctaactttctaattacaaaygacatgtggaatacattttctaattacagatgacgtaggtcacaaacagttctcagatgagagtaacagaaagagaccaatcaaggtagagtcatttggtgcctagtgaaaaaagctctcttgtgactagaaaactcaaactgctatctggtttcctccacagatttatttgtttattcaaaaattatttatcatttatcccctagtgctacagataaacagccagaggaattccttgcctacttggagctttctctgtgtagagaaggcagataataagcatataagcaattaatgatagcgtaccttcagatagagatgagtgccagggatagaaaataaaataggacagtggtgtagatggagagtggttggatgaggatttcctttagctgggggatagggtaagaaggcccttcagagaaggtgaagagcaaagtgagaacaagtttagtcagagggaacnatcagtgcaaagaccctgaaactggaacaagcatgaggtgttgagggtcagaaagaaggccagtgacacagaaggggcacgcgggagagtgtcagatgaagctggagattggacagggacttgagcaggtacagcagtggttctcaaagtgcagtcactggaccagcagcatcaatatcatctgggaattcgtgagtaatgcaaattctccaggcccaccccagacctcctgaatcagacactctggggtggggcccagccatccgtgttctaaccarccttccaggtcactctgatgcatgcttaagcttggatctgctgatctagagccttgtttgccatgataaggaatttgagttttagtctctattggaagctttcaagcaaaagactgaaataatgtgactctgcctttgagaagataactttggcctttgtgagaagaatgggcatattggtacttactcttttatgtatatgttctgactaaaaattgtggctcagcgggaaagaacaattagcaaattcatgctgagctctatttgcttttattgtgaaggataattgtgttcagtctcatgtttgaatcccagatgtctgtacctgaaaatgcaaatagcaattccctactgtgagatgtcagataactgaaattcaaatacacttgtggaaatgcaaacccattatcaattgtctttgagtactaatgtcttaaataaggcagattttctagttgaaataaacaattgactttagcaatggaatataattaggagagttattaattaatattagttgtctattttactctggatatcagctcatttttggtattgtgtgtatgtgtaagacatatttctaaagtggaaacttaaccttcctactataaaattcctctggatatttattgagtcttcaagggatgattcaagaatgttctagaacaagtcttcttccactactcacatttgccatttcctcggcttcttccctacttccctcttttcctatgatatacctgataaagttatatgagggtattttgtctgtgccacaactatcacaggtagacctgtgccacctcccattactggaggtgttacctcttgtcatatgtccttgtggcactgtggtagcatcccagtggactagtgctatggctgctttgctgaaggggcaaatccctcacaccccattgatgccaaagttagacagactaaacccaaataaatgctgcctctgcttcttcacatctcacagatcttttgagaaaaagccactctttttattcctgcttatgcccctatctcttcttaggactagacaggattcctaggaatggccagaggcaattctccaagacaaaccctgagttttcattccttcccatatattctcttttctaccagccaccccgtttctccagccgactggcttaaccatttgtgtattacttgaaactttgctgcctttgttttctttgttttcttttttttcatgtattctagacatatgcagccacattagtgggtatgttatgcattcaaatagttatgcattcaaatagtgctaattaagttacctgaagcctgtaactgactgtcttaggtcagcttctctgagatagagattagtgtgcagaaaatttattggaggatgtgctcagaatagcacctgtgagggggtaggaagctgactggacagaggagggagtgaaactgcagtgcatcaccacagaggccttagacaatsccacgaggagctccaaagtggggaaagaccttcagagtcatcccaaattgaggcaagggagctgcatctaggaacccccttatatgacctgggtagggggcctaaccttgggcaaggcggctcccttagaaagggcaatttccaaaagggacacaggtgtgaaaaccagcaccttwgtcccgaagaatggggaagcagatatgggttctgtaccactatccactacagttgcagaaagacctttcacttttatatgtgagggggaaacagaatttgtaaatgtttatgatcattccttttcatacctttgatgagctaatggccgataggtgaaaagtagacctggaggagctaggagaaagtcaaatggctttacctggaagaaaagagagtctggaatggaggaggaggagaaggagaaggagaagaagaagaagaagaagaagaagaagaagaagaagaagaagaagaagaagaagaagaagaagaagaagaagaagaagaagaggagggggggagggggagggggagggggaggggggaggggggaagtcaaaggctccaggtagggtcagagaagtgtcagtgaggctgagttctgagatctggcaacaaaaaagggctagatgtgagcaggtcctgttcagagtagaatgcagaaaaccctggggacagacarcgatatttaaaaagttgttttaggaaatctttctgtgtgaagtaaaatacaacttccttcctgatctccttgagaatctctagttaagattttcagttttttgggaatcaaatttgtgtgtgcttctagatttttttccatgttgagattggccttaaggttgggacctataarttaaagtaaatctggccaggcatggtggcatactcctataatcacagctactcagagggctaaggcaggagaatcacttgaacctgggaggtagaggttgcagtgagctgagatggtaccactacactccagcctgggygacagagtgactccatctcaaaataaataaataaataaataaatctcttggccatttctgctagtacttgctccagtctatttcctttttgctctcctctatcttcattccctcctgtctcaattcttgtatgtttcttagtacgaaaaaaaagtattctcagtttctcatacagaaaaactcagccctcttcctatccccaccctcaagcttgattctgacctccttttgtacacacaaagattaattaatgtcatcctctaaacaatgtgctagattgtcagggtcttaccctttcatgtatgttttatttaaaaatagtgttttgaaaaatatttttaaagttatatgtgtggatggtattgagttaaatattttaatatgttggtgaggaaatgccatcctccctaccactttcacctccctagaagcatctactttccatgttttaaagtaaatttcctctcagcagtttccactcatgttatcttcttgtagaaatcattcccatggacttctgacctggcccagtctggtctggtgagctcctaggcaggctgcatacattttattctgccatctccctttgctgtcatcctggagattctcttttctgctttcttgtgtaaaatcctctgtttcctgaaattcattatttctactttcttaatttactcctttgttttgctggagcacatctctcagtatcttcccaagaaaggatacacaagagggaaggttttgttgttgttgttgtgtgttttgttttagaattttcatgtctgaatctgtttctcttttatcctcatgctaaataataatagttgggcatgtaagggcttctagatcaaaactcactatttccttcacatcttgaaggtattgctctattatcttttcattttgattgccttttttttttttttgagacagagtctagctctttcgcccaggctggagtgcagtggcacgatcttggctcactgcaacctctgtctcccaggttcacgcgattctcctgcctcagcctcctgagtagctgggattacaggtgtgcgccacaacrcctggctaatttttgtatttttagtagaggcttggtttcaccatgttggtcaggctagtcttgaactcctgacctcgtgatccacctgcctcagcctcccaagtgctgggattacaggcatgagccaccacgcccagcctagactctccattctttataggaaagcctatttttttctcwytctggaagtttctggcatcttttaattctccctaaaattctgaaattttactgtgaaatttcatacaatgtcttaataggaatctattttacccattacactgggccattaggctagtcagagctttaaatctaagatttatatcttccatgtgtagaaaatttccttgagttttttttcactgacagttcctctcttctgttttctctgttctatctgatgattcgatttttgaaatgtgaacatatttagaatctctgcatactatggagagatttgttgactctggcctttactgtagggtgattggatggactcttttcttacagaacttctgatatggctgggtgcagtggctcatgcctgtaattccagcattttgggaggctaccctaagagttcaagaccagcccggctgacatgcaaaagccttgcctttacaaaaattagcaaggcatggtagcacatgcctgtagtcccagctgcttgagagtctgagatgggagaattgccagagcctggggaggttgaggctgcaatgagccatgattgtgccactgcattgcagcctgggcaacagagtaagaccctgtttcaaaaaataaaataaaaataaacaaaaacaaacaaacaagcaaacaactaacccccaccaaaacaacaacaaccaaacaacaaaaatactgatatcaatatctttagaattttctctttggctggttacaatccccagagaaatctcttctaatcccctgcatgtctgccaacctccgggaactgagagatggaaaggggctgaggtctgagcattcagtttgtaaatgctctataattctatcgttttcagtatggggctttgcactcaactgtttggagacccttttttcccattcctgagaatagagctccaggttctactaagatggagaaagaacaatggtagtagactaaggaggagcaaatgcttcctaaacactcttctaacacatcttcctgtgtttagccgtatcatctttctccctttcagaagtatctggtgccattgattccggagcctagtgggagttctgcagtgtagaacagattgtttcttgccttttcctgctgctgatttagaattctgctttctcagtctaccaagtcagttgtcacccatccwtccattctctagcccccaacattttagattattgtctcctctcccattttcctttgtgagttcaagcatttaaaaaatatcttgcttgggatttaatgtggtttggggggtgggtgcagaactaagtatgtgcttttttttaatttttatttttttgagacagagtctcgctctgtcacccgggctggagtgcagtggtgcgatctcgcctcactgcaacctctgcctccctcccaggttcaagcaattctctgtctcaaacgcctgccaccacgcccagctaatttttgtatttttagtagagatrgggttttaccatcttggccaggctggtctggaactcctgacctcatgatccacccacctcagcctcccaaagtgctgggattacaggcataagccaccatgcccggccaatgcatgtatttaattcaccactttaaatcagaaatgccttccaatctatttcctcccctctagtctctgaattgggttagaagaagtggagaattatatgaattatggcatctctatccctatacttccccattagaaatcagaaataggtacagtaaatttagattaatttttttctctgtgttacatatcgacatggtccaattctgtttctgcttaacgtaagatgagcagagatgtatttaaatcttagaaaaaggaatggagattaggtaatagcagaaatctccagactgtgtgggatgttgaaatgtgttatcaggggaatccgctgaagcttgtgagtagctgaattgacacagagctaggagcataagcttggatcttaacttggctggcattgcctttgtaaggcacaacaattggtgcaagaagaagcacactcttttctttgtctggattaggaaatatctgcaattttaagcaggtgcaatgctctggttgatgcatctttagatattgaagagttgtccctgagatcaagtcagttacatccaattaatgtctgggcttcatttttgagagtggaggatgtagtggctgtcagacgggcagtgccttagagacaactgtggaggggaataaggggctctagctatgggtttgaaaaccaccacatgtaatccacctattaatactatatcttccaatttcttgttgaaaaagtggtgtctgattaccctgttactattacagtccctaggtttacttgctcagccatttgtttttcttctctgttatctctcatattagttacaacattagcttacctagatattttgggggtaatttttttctctcttctggtgagagtgagggggtgttggggtaagcagaaaagcattcctcctcccccaccaaggrggggatttttatttttatttttttaggaaaaaagtggtttgcccctgtgaagttcaccttaggtgatgagatgttattgcatatggtgaatccagtgctgcagggagaaagctatctttgccatgcattaaactggattggatatatgtttaactgcaaagtcaagctcgtgaaaataaagttgtcatttactagtttgcactggaagcttggccactccttaccttttctgggttttaaatttggaacgataatgctggtatactgattatttatttggcaaggattttccagtcccatgtgttattcaggagtaaagatcatgggctttggggagagataaacctgggtctaaatgtgtgtgacttggatcaagcaagttaatctttctaaatctcagccttcttacttgtaaaatggggatgatgtgaatgttcctcttagggttgctgtgaagattaaataagcaaatataagtaaattgctcagcatgtgccagtgagggacaactactgtcatcaccctgattttcattgctgtcatgactattcaaagataccgaatatcagaagggagaagaaggagaaaaaggaatttcctaagtggcatgggagtaagctgaggcccggccttttctttagaatctagtttaaggmctgtaaacgcctgattctacagcacagatcagcaaatgaatcctgctttatggaacaggaacgtacactagttctctctagaatttttgttttcttttttttgagatcgagtctcactctgttacccaggctggagtgcagtggcgcaatcttggctcaaggcaacctccggctctggggttcgaacgattctcctgcctcagcctcctgaatagctgagattacaggtgtcaacctgggaggtggaggttgctgtgagcccagatcgtgccaatgcactccagcctgggtgacagagcaagactccatctcaagaaaaaaaaaaaaaaaaagttatgcaaaattgactggaaagaatagcatgtagtaaatgaagccttttttctttctcctgttattaaatcaaatgcatttcataaaggagcaggagcctcttaaataaatgcaatgaagcctcccgtaagcatttactccagggactaacaaaaatcaattggttactcaaggtagatctttaacaaaagattgaatcaaaatgacattgaaaattacatctacaccataaagcagtgtccccgtaagaggagtgatcgcttaccatgcagcatcctcagtgtagattcctttatctattttaaagaagaaggcttgattgaggaatgccgcattgaatacgaagatttattctttcatctgtttacttataaatgctcagattctttattttaaataactaagagaaagaaagaatattcccaagccttataaaaacaagagtaagtacagtcatgcataattctcatgagacctccaccttggctgatactgcctaattaatctttacagctcatctgtaaggaggatgcagtttaaatgtgtcccaatctgtagatctaataactatggagcatrgaagataaattgtgtttggcctgagtggctgggtttagaggagttctctacagtcactataatgaggcctattctaagctttgcacacaaggggactttgactcagagctttctgtgtgggattcctgggaggctgtctaatcagggaaaatttgttggaaatgatcaggtggtcctagccattggaggagtaacacagtctgtgctatgcttttgagacctgcttggacccagtctcttttctaaattccaggatctggataggttgaagatgctgtgcccagcaaggtacatggtgaaaattcctaccagtgatactaaaggaactaaaactcttatgcatcaccagatgcctatggaggcggttccctaagagtgaaagcagtgtggcaatgatgatgctgacatgatgatggtgacagtgatgatgatgatttatttaatgctgctctggtaggcccagagccacatgctctattttctttacctttaatctacacaatcttctgtgcagttggtactattataacaccaagtttataaaggagaagtaaagtctctggcttttgttaggaaagaaaaaagcggaaaaccagagcttcatagagggagtcatgcttttctaatgtacgatgtgacagtttgctttgcaaggcttctttggtttgttacagttctgttcaatttttgattcaaggatttctttgggacatggtatgtaggtctttgactaggtactaagcataaagaaaggaaaataggcctagtgcctatccttaagaaattcagtctaccttgggctacaaacccaaattctttcagggacaatcatgctgtgtgacatcgatgaatatgacagtgtgacagggcctgagtctggccagagaatkcatgtcccacctaaaggtgttccaattaagataaacagcaatggcaacaaaaatccttgccacataagcagaactcctctctgggatgggttagrcctggtcattatttttgtgattcatgggctagttatttctttattccttgaccaatagaatgtttgttatttttcatattaaaataaaacacagtttctgtacctctctgctgtggaagcttaggagccaatggatagccatgatctcctgctttgaggataccactgtaatgggaatggagcaggttcacagacagaaacagacacaagagggagggggtgaaaaagagtccagatggcattcatatccctggccccagttgtctccaaggcccagtgatacatttcctgcaatttggttgttcaactatttatttagttacaaaaaaagatactctagaatatctttccaagatccttttctttggctaaagctagtttaacttcagttgctaccccttgaatctaaaaatgacttgactaattcacagggctgcctgtgaggtcagtaaggaagatgaaggaggtaggggagagtcaaggatgagaggatgggatccatctacagagcacatggccagatggggcaatttataatcataatcctaaacatagaggcatgaagtcttagaaacaaacattggggccaacattaaaagacaaaagatactataggaatagagggggaaaaagcgatagaaaaaattcaattcttatttggaagtgaagtcataattcattaacttttgccagaaagtttttagaaaatggatcccgttattcctcagtaggtcaaagacagggactttaaaygaggctggggctagttttcagaagaakgtggtactggaggcactggggtaatccgtaaagtggactcacttctttagcttgtccccagaacttactctggcttcttggggttccacttccctcattggaaatggaccggggggggctctactgtcttcatcccaatcaagaccttaactctaagtgtctctttgccttgttcctgatcttaggttggaaattttcaatctgtcatcattatgtatgaggttaacyatgaatgttttgtagatgccttttatcaggttgaggaagttcccttctattcctagtttattgagtgtttttatcatgaaagagtgttagattttatgaaaagtcgatcatgtgctttttgtattttaatctattgatatgatgactatgttcatttgtctactgtctttaatgtagcttcttgaacactgaggacatttatctctgtatactcaactcatgtcatcacttgagctctttgatagcagatattaggctagaatttggggcacaagagttttactggggatcggcacttatggaagaggtgggaggaagcaagattaggcaggggaagaaggtaaacggtgatatatgtctgacaaaatctcagccaatctgtcagggagctctgggataggaattttccatcagagttgtcctatgatgggtcaaaatgattggacctttttgcccattttgctcagtaaccaaatgtggtctaccccatgaagggtgtgtcccatagccaggtagctgcctacagctgaagtgactgtgaagatgcttatatctggaggctgtcttcagtaatcttcccctgaagggtgatctgggctatacattactatgtcaaccacaccactgctcatagaaatctgagactctcacccaacatttgttctagtatcagaggtttcagtcacagagtagaacagaagtgtgtagataacctttatatccttggtcaaaatctatatacaaaatctgtatagtaggccaatagccacaaatccataagcaggttcccatactccttcatggacttcttaccagcacagaaaactctatatccacagtgttccaaggctttgatgactaatctaaatattatctcatgagaagcaggtcagccccaaataaaaaaatatttgaaagtctgggagcagcaactcaggcctataatcctaacactttgggaggccaaggagggtggatcacttgaggtcaggagtttgagaccagcctggccaacatggtgaaacaccatctctactaaaaatacaagatttagctaggcatggtgatgtacactgtaatcccagctactcagaaggctgaggcaggagaatcacctggatccaggaggtagaggttgcagtgagccaagactgcgccactgtactccagcctgggtgacagactgagtgagactctgtctcaaaaaaaaaaaaataaaataaaaataaaaaaaattgagattagatttgtattttctatgatgacagataattcttataaaatctaagaagtgaagttttactgacactctcttcatttaagaaaggaaatttttaattgaatatgtactttaatgtccctgttttatgtttatttattctgctagtcttttctcattgtcatcttcatttttctactaaaagtctccatacatgttattcaggaagccatagaaatcatgagaagaaaagaacgagagatgtaaaaattatatctacttctaccaaagaaacgtttataaaatgtaggataaatacttggcttgctgtgggtttcactttttattcactctagctttgtttctctaggtctcactttagtggccctctaaaaccaatgtagactgggttgaatttacttgttctttgttctcagaaaatgtggcataatgaacaggaaaccacatttacactgatgtgaagtgtcaatacattttatgtaaataagtctctagggtcttacatagattatctgggaagtgggaagggagaaattaacccattcagtgttgctaatcattgatcgtaatcttttctagaagtgagagtgactatttggtattattttattcagaattgtctacgtattgttttctgtgtcaaatgtttcttccacaaatgaaatcaccaatcattcctttaatctgaaatttgactcattaataacaggtgttagatgtatctctgtctctctgataaatgccagcactaagcagagagactggtacatggtagagagtttgtcaacactgcacgaacaaatgcttttaggccttttcaagtacaaattagaagaggacccttactgatagtttggaatatgaaaagaagcatcaaaatttcccctgccttcaattctaccctccttatcctcatggaaatgactagttgaatttagatattgcagggaacatcaaggaatttctgataaaacggtgcaggtatgtccagatggaaagtgactttgaggaccaataaagaatttgtggtaagagtacagaaaatctactctcagcaaatttccaatatgtgcaatgatggttgttcatttacctgatggcagtaatcacttcggtatgtatattaaaacgtcatgatgtacaccttaaatgtataaaattaaaaataaaataattattgaaaaaaagtaattctaatataaaaatatttatttgcttatgaaacgactgtctcctctctatttatagaagtcagataggccatatagtaggcaaatgaaattgccagatgaatagcatagaagttgaaaataaatagtctcactttgtgtttcctttcttttaaaaaaaataaaacgcagagtttggttctgtaatattgagcaactgttgattttcatgatagctatatcagaacatcttaagtaatcagcaataaaattttccattgttgagctctatatgagcaaaaagacatttttttattgctctcaccctgtaaaatgctttgaggaaattacagcaagattacaatgagaaatggttggcaatgatatttcagctgtcatttatcttayagtaatcacttttaacctgcttagccttttattattccatgtctaaaaatctcctttataatgaaattacaacattaaatggaaagtaacaacacaaacacaaaagagctactcatatttgctgtgctgcatcattactgatcctggaatgttagtactcagctgatgaaacaaatatcttgacaccttacaacaattataaatcatgaacatttaaaactcacagggattacctttcctggtgagttgtcatggatctctgattcctgataagctaattctaggagactggcgtataatagtgggtaacttttattaactatgtagtatttggcaggcattatgctaatatgtgttaaatcagttttatcattcaatcctcacaacagccaaatgagaaagttcttattctcattttacagattattaaatagatgttcaaaaagttaagggacttgcccaggaatacatagtaagtaataaagctagaatatagatagatagatagatagatagatagatagatagatagatagtagttaattgttgttaaccaaacacattgttattgtaactagtttaattaaatatattttgaaaaatactattagtattctcatgattatattcactgtagaaaaatcagaaaacaagaaaagtgttaagatgaagatagaaatcrcccacrctttcctttaatgcttgtcattgtttagatatacacgtgaagtacaaagytggaataatatcggaccaaatgtaacctgcttttccatgtaaaaatgtagtatgaacatttgttcatatcattagttttcttctaaaatggtattttaatagtgtttaacacatgatatttcaccttataaatacatggtttagtcagccaacttcttattttcattttgatttgtttttctaatttttcatcattataaacttatcacagtgaaccttcctgtttaagagtctcttgttatttttaattattataaattaattgagattgagtcaaaattactgctttagaagcatttgatacatatttctaaactgtcctggggcagatttttgcaagatgtattagttgtccagggctgcagtaacaaaataccacaaacttggtggattagtacagcaaaaatttattgtctcacagactggaggcttggagtctgagaacaaggtgttggctggtctgtgctccctctgaaacctgtaggggaaggatcatctcttgctttttccagcttctgggagccccagacatattccttggtttgtggcagcatgactccaatcttcacacagcatattctccctgtgtctcttcacactttctgccctctgtgtctgtattcaaatttcctttttatataacgacatgagccctagtagattagaacctcttaacttggataaatctgcaaagaccccgtttccaaacaaggtcacattctgaggtatagggggttgtgacttcagtgtatctttttggggggacataattcaacacatatcaccaagtatacaatctttatcaatgtataagagtccttatttccctgaaatttcaccaggactgcataaaatttaataaataaaaaagatttcatgtttgctgatttaaagatgaaaaactgtgtgcacacacatgcaggtgttgtttgatttctattgaaattgtgcattttcttatggatgattatgctttccctcaatccacccttgacccaccccagtctggcttccagagtgccagtagcctccttccacctgagttcagtgttcacgtctccgttttttaactgctataacctcttcaatagtaatgcattctgaacctgggaggcggagtttgcagtgagccgagatcgtgccactgctctccagcctggacgacagagcaagactctgtctcaaaacaaacaaacaaacaaacaaacagtaatgcattattgggacccacctttccttcttgaaacatattttaagtttgccttgcatggctgtgcctttctggttttcttcctttcttcttggctgctccttttcaacttcatgtgcttctttttttttccccatcctctaaattccactgttcttcatggttgtgtgctaggtcccttcctatcctccttccctccctttcttttcccctcctcccttttcttcttcccccctccactgttcctctgcttggtagcctaaattaccacatatgttaatcaatctcaaatctgcatctctaatctagagttattttctgatcttcagacccatgcatgtacctgacatcagtattgcagaactccaaattcaatgtgtttagaagtgaatcaacacctttctccttaacctgtttctcccctcctatgtttccttacagaaacaccatctcatatagttgcccaggacagaatcttggtatcatcctcaatccctcctctctctcactgtgttaattttttattgctgctctaacaaattgtcgcagaattagtgatttaaatgtacaactttagtatcttacatttctggaggtcartagttcacaatgaccctcactgagccaaagtcaagatgttggcagggcggcatgtcttctggaggctctgggggagaatctgttttcttgcttttcctagtgttccttgggtcatagctgccttccttcatcttcaaacccagcaagttcagcctaagtccttcttacactgccaattcctctggctctctcttttgtcttcctcttccacccttaaggctccttgtggtcacattgggcctaccatgataatgtaggataatctctatatttaaggtcatctggttagcaacctaattccatctgcaaccttaatcccccttttctgtataacctagtatattcatagattctggggattcgtccagggacatctttgggtagttattattctgcctaccatacctttcttagctaattagctactccatctaaaggcttttatctcttaaatatatctcaaccattccagtttccttttcctttcttgtcttgacttgyaattcggatctcatcaactctcacttgaattgtgcagataatctcctaactggcctcccagcttttggctttctccttgccaaggcattcgaaacgcctccttccctctgcacttcttaacgtgaagcatgggtcccctcttgatgtatccattgcttacatccccagctgcttctcttgacactctctccttgcaccctttatttcagctgcttctgaacttcatcttcctccagcacaacatgctctctctcacctctgggcccgtacacctgttccttcaaagtagaacacattgtgtttctatctttgtcttgctaaagtctacttctctttcaggtgtcattttaaatgtcactttctttaggaagcctctgctgatcccygtcctccaaattgttatatgtccctacttccctatttcagaacctattaattttgtgatttattgttgttgttgtttatttaactatctctctgctcttcttgactctaagtttcatcaggaccaggagggagtcatatctgtccagtttatcactcctagtatatttttagtgcctaactggtatttgacatagtaatttctcaacataaatttggtgaataagggtatcaccatagtttaaatccttattaaataaaatgggtgcccagtccagccttgcctacctcttgagcctyatcctacctctctgtgccccatgcacactggcctttcagcatttccaggggcccttactccctygtgctgcaggaacattgcaccctgcgtcctgtctctgaagtgaattcccatgtccatgcttatcctccagatctcggctcagggctcacctcttcagggaaatcttccttgacttccatcttattacggactaattgtttgtgtcccctcaaaatccatctattggaacyctgattctcgctgtgatggtattaggaggtgggatctttgaaagggaattacggttagatgaggtcacgaggcgagggtccccatgatgggattagtgtccttataagaagaggaaaagactggagcttactcttcctctcttctttgtgaagacacagtgagaaaatgaccatctgcaaaccaggaagagggccctcaccagacaccaaatctaatagcactgtggtctaggactttccagcttccagagaaataaatgttgtttaagctactgctaccgagcctatggtcttttattatggcagcttgagctttagacatactctcactactttctaaggaaggaaggagagaggcaagtcaccagctttgagtcattttcaaatttgataagaataacaatagcactttcatctaaattatagactaaaagcttgaacaggattgagccaaatacagaaacctgggaatgctgaaacttccctccaagttaatactaatccattaatcaacactctcagttattaataggctgccaccaagcccatgtagaaaatatgaacgataaagtaatcactggggaatcttgaaagctagatttaatatttcagaaaaattcattcattaatttattcactcaattgagtgcccacttaatatgtagccctgacatttttaactgaatattttggtyatgggagctataacagagcttagaaacttcagaatgtcagccttctgcctattcagaagtcatgtaattagttccttgtctgttttgatgcatctagcaaacatgccacaaccatggaccaattttgcattcaaccctatgttcttctactttaactttaaaattttcatccatctactcaactgacatgtaagtgcatcactactacatagcagccacttccatcttctttgcttaaatgaaatggagattgtgactacctcttttcactagatcagccttggggctttatcatcccagaagtagtcaaggcccagaatgcatgatgaccaggaatctgtgaatcattgccagcattcctggattactcaccaaaggagcagaccattgtttccagctccaatgcaacatttgatttgtaacttgcagtttttctgaaagtgtgataggatacatgttctctctcccaaccccttgttcatgtgatcatcaaatcccataatttttacctcttacctcccatctgcagctctcctgctcctcctttatccagggcatcatcatcatccatctgaattgcagccagaatattctagtaagctcccttcttcctgccttgccactctccggatattcttcatatggtagccagagtgatatttctaaaagacaaatcaactcaagccattctctttcttaaagaccttcagtggctccctattacccatgggcttatgtctaatctcctatcaagacacttaaggcctttgctatctggttctaaccttcctctatagctcgcattttttctattctctgtatagtatctttggctcctttcatttccctgattgtattaccctcctgtgcctttgcagttgctagtgttcttttgcaacatcctactttctctgtcttgctgaatacacaggaatgcagaatgcactcaaacacgccagagaagctctctggagcacacccacctcaccaaacccatgcataattaggcattctttcctttatatttttatgtttataaaaatcagattagattaatagattattgatcccttgagcttaggactgttttattttcctatatccctcaaaactaaaacatgcagctatacattatatagttgttgaattaattcataaataccatcatattagaaaatgcttatatggtcgttagtctatgtcaggcactgttctaaacactgcacataggttgcctcatttaaagaatgaatgcatacagccaggtgatccttttggttgataagcaccaaattgtgagttaaatgtggcaaacatgggaaaactactttagcagccactgtgtcaccaacccacaatcccattttcttgcttccacwtttttcagctcactagtgacctcccatggggcttcagtctatctccattctagaaacaatctgatattaggcaggaagtttcaaggacccccatcctcttccctagtgcctggtagcatcaagcctcagtgctgaacacaagctccaggctgtgttgtcgatggccttgcagctaatctgacccagtgtaaggtgtctgaatagtgactgtagtcagtgtttatatagttgtctatccctttctcagatcttcaaattgtctgtcctggaatggtccattagtaccatgttttccaagctcaatagtctcacttcttctatcctcatgtgcctcagtcaataggatggtactttagactgaatccctattccaagattttatttgaataacatctgagataactgggacttctattcattccccactgcttcctatgcttctgctgaggagttttctgacagctgtgggtagaattatagtagctgattgtttgttggactgctggacttttgagcattgtccttactactccttggaggttcctggtctggatctttcttgagactgtgatgggcttgtttgcctgtataaatggagcttggctgccagtccaaaccttacctgcatgtatcatggtagtttcgatgtgagaaagcataatttttgcctttgtttagcttataacataatccttttttaaaagctaaacttccttgatcacatattatgtgccagacataaaactttcacataaaagcttcagggtaggcattactatcccctttataygatgaagaaaccatgtttctgaaatattaaatggttttctcaaggtcacagagtaagtggtggaaccgagattcaaattaccaccagtctgactccaaacaccaagctctttctctgcatattggaggaggaaacacttgggacacacagagaagtatttctgggcctctgaaggaggctgaattcataataagttctcaatcaatactctttgctttaaatgttgacccagtgttgctgtccaagcctttcttattgattgtggttaaagcaattgtaacatcatgaagtagaaccaatcaaaagcttccctgaaatgaatgaacatggaatgccttgtagttacatgactgtgggttgccaaaaatgacagaagatgtggttataagcacattcaaatccagtaaaagccttacaattgctggaacaattttcttcaagtagatgagggtatttgagtgtggcaaacaggtataaattctgtgtaaacagtggtgtgcttgggctaccctgaagatcacaaaaagtgatgaggcaatgggtgggccagcacattcttcttaaaaagcagtggaatgccagcagcatcaggaaaggggctgggggccatagaggaccaagtatacctttcagaagaagaataccataatcacagtgggaagtggccagaacagtagctactccttgatcatctctagcatggattggttagcaatgcacacctggtacaggatacaatatctgagtgagtggacatatgatgcaatgatccatgggtgtctacatgagcaagagtgatctgaataggcatatataacatcagaagatgtttgtgaagcatatgtatgaacatgcataagacctgagtgaacatgtgtatcatctgcaaaagggtaggtaatagctaaataagcacatgaatatcaaagatcaaagtgaatagtttaacatatgtaagatttaaatgagcgttgttaacaacacagtgaacatttgcattattttcatgtacatgtgtgctgtctaatgaggatttgcaatatctcaggaataacatctgaataagcacatgtgctatataaatatcagtgtgtaatgttggagctctttgccatctaagtgaatatggtttttagaaaagctggccaggcacagtggttcacacctgtaatcccagcaccttgagaggctgacgtggaaggattgcttgagcccaggagtttgaaagcactctgggtaacatagtgagaccccatctctacaaaaaaatttaaaacttagccagatgtggtggcccacacctgtagtcccagctacaagggagtctaaagtgggagggattgcttgagcccaggagatcaaagctgcagacatgtgtaacattttagtgaacatgtgtatcacccacatgaataaggacatcatctgaacaggcagggagaacagctgaatgagggtgtgtgacatctaagtcagtggatctcaaacttgagcatggccagaatcatctgcacaayttgcacagattgctgggacctcaccccagagtttctgattcagcagattaagggtgaggttagaatttgcatttctaatgagcttccaggtgatgctgcgcctggtggtctggaaagtgcattttgagaaccactgtcctaagtatgtgtaacacctgcatgtagcacccaagtgaactgattaacatctaagtcagatctaartgaacatgttaacatttaagggacaaatgtatcacccaaacaagtattgtgccatctacaggagcacatgtaacatttgaatgatgtgcttagaatataagtgaacctgtgttacatctcaatacctctgtcaaacatgtgaacaagcatgtttaaaatctgagggtatgtggaatatctgagtgagtgctagtaccatctgagtagatttaaccctagaaggtatgtatgtgttttacacctgaaagtattcattgtctgtatcataagacaaacatacaaataattaccatacactgtgggaaatgcagcaacgagtgtccaaggaccagagacacacaagaaacaatggccacattcggaatggaatccacccagaggaggatgtgtggatggaagagatgacgtgtgaggtctgtttcaaaagctgattaggaattcttcaggatgccaggaagaggtaggtgggggaggtatttctgtaagagggcccagctaaggcaataagcataaaatataaaatagcttggcatgtctggagaacctcatgtagttttggatttgtataatgaaaatacgaggagtagagaatgagactagagtgttcatgagasatcaggtcacagaagtccttgtggccyataacactgaacctgaacatggtggtgctttttttccccctcccagtaagtgatagagcatcaatgsatagatttaagcaaggaagtcatgtgattggtttgtgttcagaaatatcactctggaggccgagtggaagatagattggaaatgtagcaggaaatctactgccaacatctgtttatgccagatgataaggtcttaaattatagcaaaagcagtggaaagaggcagaataagaagacattttagaagtaaaattcaatagsactcgtggacttgtgtcctggtgggtcatgagtatcaggtagaacgaataaatgagatgggggaggaaggcaggatgcacagggagggatgatgcatttgatatcagacacagtcaatcgaggcacttctgcaacattcagaaggggaggttgcataccccttctagggtctggaggtcagggaatagttcaggtcaaagacagaagtgtggagatgatctgtcagtgataactaaactcatgggaatgggactgactagtgaatgagtggrgaacaaagaggctaaagatgtggagccccaggggtcatcaacatgtgaatggtgggtaaaagaagagaaagsgraatgaagtcaacccatcagggaagcaggcaagatgcagcagcaagtggcctctcaaaacagtgcatccctttaaaaataggaaaagtgtatttaatgtaaatgtcaaggatmragtgtgtggttcaagaggaaccaactgggaacaggaattcctgagttccatcctggccatgccactgggtacttttgtggtcttggttcattaattggagtttctgggcctccattttcaaatatggaaagtgagaagtgagtcttgaatataagagaacaagagctcactaacttctcttttgtctatagatgagcgtttaaaggctgtcctcgacatgcttgttcttatacaaggacaggctctggagttgctcagtcctgggttcaaagcctaaaggcaccaattactagttctttgactctcggaaagtcactcaatccctctaaacctcaattttctrtaaaataagtctaatggatgtggtgtgtgtgtgtcggggggaggcgggggaggagtgtgytggtcagkggggatgtgaatatttaaagagacaagccatgtaaagtgcttagtaaaatgcaaacaaaccagcaacagcaaaacaaaaccctatgaatgctattatgatggagaaagttgaattaaattgtttctaatgtccctcctagcccagcactstttgtctgcgtctgtttccctttttgtctatgatcctgtgatgagccacttggtaaatattcatgtcctaaatattgactaggaagaaggatttgttttctgatttctgacatatattgcaaagttgagagaaattaattgtggtgggaaaaaaaagcatgaaatgcaaatatatccagctctccctgtctgtgggttacccatccatgaattcaaccaacctcagattgaaaatacatggggagaaaaaggatggttacatctgtactgaacaggtacagacttttttccctttgcatcattccctagacaatacgatatgacagccacttacatagtgcttacattgtattaggtattataaggaattaagagatggtttaggatatacaggagaatgaccatgcgtatgttatatgcaaaaactacaccattttatgtaagggatttgagtatctgtagattttggtattcttgagaagtcctggaacaactcccccatggataccaagggatgacagtacactaaataaatatggctcaccagaaagtgcccttctttctcctcttctccccttgaagcagtgaaggagtctgtgctgtatagaactgaaagagagttttccactaatgtccaataataaattgcttcccagatccagtcactgatgattattttttctcagtgtattgcagtaaaatgagaaagagttatagatttgggaaaaaaatgtggtggctgattattttctttctttctttttctgacatacggtcagaggggctcatcatttcctttacaagaatcacattttaggcattttttttcttacgtgcaatattctgaaacatgaaatttacaaaaaaaaatgagttaatatgggtccctaactaaatttagaacscagcaaagtagaaagataaaaaggtctgatttaaagaatgtcacacatggaaagtgaagaagatgggaagatctcacctttggggtggcagtgattattttgcaatgcaaaattatttcatctccatttgcaaaggcaggctaatgagactgagtggattaaaggggggacctgggaaaggaataagaattaggttttaccttctaattacttatttatttttatttgtgaaaaaaacctaagactgcattttctaggtattattggaactgtctgcctttgtatgagtcttccaccccaactcctcacacttctctcaactcacctgcttaaagtgcaacatcattatttttgaccactaaaataatataattattacggaaatgtattttagaacacacacttttatatgctagcatttaagaaatttcaaggaattattttctgataatatatgggagaagctcaaagacagttcatcagaaactatttactctttgttccgtgtgtgtgtgtgtgtgtgtgtgtgtgtgtgtgtgttgtgttcctagttcatatttatcaagcagttataatacacaggtatttccccaggttctttataatttaatcctcatagttagggccccacagttaggactgttatttccccattctatagctaagagaactgtggttagtaatgcaaagtaattcacccacagtaacatagctaaacagtgggagaatcaaatgtgaatgcagatctgcctgatctcaaaactcacactttgagccagtgtgcagtattgtgtatactaaaaggtatgtgtaagtaaattaagccttaagaaatgcacacccattcctgttagtgtcttgttgagcttactgctggaactttgtgcattcttttattatagcatttgctctgtgttataattagttacatttctctcattctttaccaatggttcttgacttttttgtgtggtgggatggcagtcatgaattcttctaaggatttatcaaagttaggacctctctgaagaaacatgtggactgggttaatgtgccagtgatgacttacatatcatcatatatttctcccatcaaaatataataagtgtccttgggttttctggctttttatttatcattcttttatttagtatgctaatactaaaggaaatgtggtcctgtcctgaaaatgagtgtttactgtcaatgctcctgaatctttgttactgtatgtcaccttttggtccagctgcagctccagaaccagctctggacagtggttgacacatttcttgaagacctgaggataatctgaggtaattcaaatggaaaaaaaaaaaargaaacaataacaattcagcatcagacattattgctttccaaaatttcttatgaaacactttatggaatatatggtcatccacttgaataaatggaataaaaggatgaatgaaacgataaacaaatgtaaagatcctttagatatcaatggaccatayggttcaaacccttgaacaaaactattagctccttgagggcaaatcttttttttctgcattcttcatcattctatagaagctgattctcaagaactgtggtatttcttgaatatatttagagaataaacccatgaacccaatacagataaccctaaaccacaaagcagatgagctcctctgtttaaactttttcctttaaagccagkctagaagccctttaaagagtacttgcaaatacaagtgcagtactattctcccaaaaaagaattctgccatcacctcttccatgctgtttataagttactacctttttcacttatcatgtttctagtaatttttatgtaattgtctgctttcccattatactataagcttgtaaactccttgaaggtaggaacaactttttttttttttttttttttgtggttcctattatagctttattctttttttttttwttttattattatactttaagttttagggtacatgtgcacattgtgcaggttagttacatatgtatacatgtgmcatgctggtgcgctgcacccactaactcgtcatctagcattaggtatatctcccaatgctatccctcccccatcccccgaccccaccacagtccccagagtgtgatattccccttcctgtgtccatgtgatctcattgttcaattcccacctatgagtgagaatatgcggtgtttggttttttgttcttgcgatagtttactgagaatgatggtttccaatttcatccatgtccctacaaaggacatgaactcatcattttttatggctgcatartattccatggtgtatatgtgccacattttcttaatccagtctatcattgttggacatttgggttggttccaagtctttgctattgtgaataatgccgcaataaacatacgtgtgcatgtgtctttatagcagcatgatttatagtcatttgggtatatacccagtaatgggatggctgggtcaaatggtatttctagttctagatccctgaggaatcaccacactgacttccacaatggttgaactagtttacagtcccaccaacagtgtaaaagtgttcctatttctccacatcctctccagcacctgttgtttcctgactttttagtgattgccattctaactggtgtgagatgatatctcatagtggttttgatttgcatttctctgatggccagtgatgatgagcattttttcatgtgttttttggctgcataaatgtcttcttttgagaagtgtctgttcatgtccttcgcccactttttgatggggttgtttgtttttttcttgtaaatttgtttgagttcattgtagattctggatattagccctttgtcagatgagtaggttgcgaaaattttctcccatgttgtaggttgcctgttcactctgatggtagtttcttttgctgtgcagaagctctttagtttaattagatcccatttgtcaattttggcttttgttaccattgcttttggtgttttggacatgaagtccttgcctacgcctatgtcctgaatggtaatgcctaggttttcttctagggtttttatggttttaggtctaacgtttaaatctttaatccatcttgaattgatttttgtataaggtgtaaggaagggatccagtttcagctttctacatatggctagccagttttcccagcaccatttattaaatagggaatcctttccccattgcttgtttttctcaggtttgtcaaagatcagatagttgtagatatgcggcattatttctgagggctctgttctgttccattgatctatatctctgttttggtaccagtaccatgctgttttggttactgtagccttgtagtatagtttgaagtcaggtagtgtgatgcctccagctttgttcttttggcttaggattgacttggcgatgcgggctcttttttggttccatatgaactttaaagtagttttttccaattctgtgaagaaagtcattggtagcttgatggggatggcattgaatctgtaaattaccttgggcagtatggccattttcacgatattgattcttcctacccatgagcatggaatgttcttccatttgtttgtgtcctcttttatttccttgagcagtggtttgtagttctccttgaagaggtccttcacatcccttgtaagttggattcctaggtattttattctctttgaagcaattgtgaatgggagttcactcatgatttggctctctgtttgtctgttgttggtgtataagaatgcttgtgatttttgtacattgattttgtctcctgagactttgctgaagttgcttatcagcttaaggagattttgggctgagacgatggggttttctagataaacaatcatgtcatctgcaaacagggacaatttgacttcctcttttcctaattgaataccctttatttccttctcctgcctgattgccctggccagaacttccaacactatgttgaataggagcggtgagagagggcatccctgtcttgtgccagttttcaaagggaatgcttccagtttttgcccattcagtatgatattggctgtgggtttgtcatagatagctcttattattttgaaatacatcccatcaatacctaatttattgagagtttttagcatgaagggttgttgaattttgtcaaaggctttttctgcatctattgagataatcatgtggtttttgtctttggctctgtttatatgctggattacatttattgatttgcatatattgaaccagccttgcatcccagggatgaagcccacttgatcatggtggataagctttttgatgtgctgctggatttgatttgccagtattttattgaggatttttgcatcaatgttcatcaaggatattggtctaaaattctcttttttggttgtgtctctgcccggctttggtatcagaatgatgctggcctcataaaatgagttagggaggattccttctttttctattgattggaatagtttcagaaggaatggtaccagctcctccttgtacctctggtagaattcagctgtgaatccatctggtcctggactctttttggttggtaaactattgattattgccacaatttcagatcctgttattggtctattcagagattcaacttcttcctggtttagtcttgggagagtgtatgtgtcgaggaatgtatccatttcttctagattttctagtttatttgcgtagaggtgtttgtagtattctctgatggtagtttgtatttctgtgggattggtggtgatatcccctttatcattttttattgtgtctatttgattcttctctctttttttctttattagtcttgctagcggtctatcaattttgttgatcctttcaaaaaaccagctcctggattcattgattttttgaagggttttttgtgtctctatttccttcagttctgctctgattttagttatttcttgccttctgctagcttttgaatgtgtttgctcttgcttttctagttcttttaattgtgatgttagggtgtcaattttggatctttcctgctttctcttgtgggcatttagtgctataaatttccctctacacactgctttgaatgcgtcccagagattctggtatgtggtgtctttgttctcgttggtttcaaagaacatctttatttctgccttcatttcgttatgtacccagtagtcattcaggagcaggttgttcagtttccatgtagttgagcggctttgagtgagattcttaatcctgagttctagtttgattgcactgtggtctgagagatagtttgttataatttctgttcttttacatttgctgaggagagctttacttccaactatgtggtcaattttggaataggtgtggtgtggtgttgaaaaaaatgtatattctgttgatttggggtggagagttctgtagatgtctattaggtccgcttggtgcagagctgagttcaattcctgggtatccttgttgactttctgtctcgttgatctgtctaatgttgacagtggggtgttaaagtctcccattattaatgtgtgggagtctaagtctctttgtaggtcactcaggacttgctttatgaatctgggtgctcctgtattcggtgcataaatatttaggatagttagctcctcttgttgaattgatccctttaccattatgtaatggccttctttgtctcttttgatctttgttggtttaaagtccgttttatcagagactaggattgcaacccctgcctttttttgttttccattggcttggtagatcttcctccatccttttattttgagcctatgtgtgtctctgcatgtgagatgggtttcctgaatacagcacactgatggtcttgactctttatccaacttgccagtctgtgtcttttaattgcagaatttagtccatttacatttaaagttaatattgttatgtgtgaatttgatcctgtcattatgatgttagctggtgcttttgctcgttagttgatgcagtttcttcctagtctcgatggtctttacattttggcatgattttgcagcggctggtaccggttgttcctttccatgtttagcgcttccttcaggagctcttttagggcaggcctggtggtgacaaaatctctcagcatttgcttgtctataaagtattttatttctccttcacttatgaagctttgtttggctggatatgaaattctgggttgaaaattctttcctttaagaatgttgaatattggcccccactctcttctggcttgtatggtttctgccgagagatccgctgttagtctgatgggctttcctttgagggtaacccgacctttctctctggctgcccttaacattttttccttcatttcaactttggtgaatctgacaattatgtgtctgggagttgctcttctcgaggagtatctttgtggcgttctctgtatttcctgaatctgaacgttggcctgccttgctagattggggaagttctcctggataatatcctgcagagtgttttccaacttggttccattctccacatcactttcaggtacaccaatcagacgtagatttggtcttttcacatagtcccatatttcttggaggctttgctcatttctttttattcttttttctctaaacttcccttctcgcttcatttcattcatttcatcttccatcgctgataccctttcttccagttgatcgcatcggctcctgaggcttctgcattcttcacgtagttctcgagccttggctttcagctccatcagctcctttaagcacttctctgtattggttattctagttatacattcttctaaatttttttcaaagttttcaacttmtttgcctttggtttgaatgtcctcccgtagctcagagtaatttgatcgtctgaagccttcttctctcagctcctcaaaatcattctccatccagctttgttccgttgctggtgaggaactgcgttcctttggaggaggagaggcgctctgcattttagagtttccagtttttctgttctgttttttccccatctttgtggttttatctacttttggtctttgatgatggtgatgtacagatgggttttcggtgtagatgtcctttctggttgttagttttccttctaacagacaggaccctcagctgcaggtctgttggaataccctgccgtgtgaggtgtcagtgtgcccctgctggggggtgcctcccagttaggctgctcgggggtcaggggtcagggacccacttgaggaggcagtctgcccgttctcagatctccagctgcgtgctgggagaaccactgctctcttcaaagctgtcagacagggacacttaagtctgcagaggttactgctgtctttttgtttgtctgtgccctgcccctagaggtggagcctacagaggcaggcaggcctccttgagctgtggtgggctccacccagttcgagcttcccggctgctttgtttacctaagcaagcctgggcaatggcgggcgcccctcccccagcctcgttgccgccttgcagtttaatctcagactgctgtgctagcaatcagcgagattccgtgggcgtaggaccctctcagccaggtgtgggatatagtctcgtggtgcgccgttttttaagccggtctgaaaagcacaatattcgggtgggagtgacccgattttccaggtgcgttcgtcacccctttctttgactcggaaagggaactccctgaccccttgcgcttcccaggtgaggcaatgcctcgccctgcttcggctcgcgcacggtgcgcgcacacactggcctgcgcccactgtctggcactccctagtgagatgaacccggtacctcagatggaaatgcagaaatcacccgtcttctgcgtcgctcacgctgggagctgtagaccggagctgttcctattcggccatcttggctcctcccctcaggaacaacttttatcttctactattgtaattccatgtttttggaaataataataataataatcatgtttgttaaaagagacttgaatcaggtaatgcatgataaaaatcaattgatctgtctatggaccaggagttgtcagatagtaagcatcttgcaaggcttattctacttcgtattcctgactgatagcatagaatctggtacccagtaggtgctcaatagatgtttgttgartgaaataaaaacatgcataggtgatgcataaagaaatgattatgcaatgttttggataagtagtatgataagataatttattgtccactttgagactctttgtgaagacaggcactgtttgtaactaagtagtcatgccagaacaacaggcatagacaagaactgtccaggcatacaagaaatttggtcaccttaagacagcaaaatggatttctgtttagagaaaataaaaaccaatagcattgtaattcagttccttttatccttattcttcctttgtttctttatttctggtaaatcccacttcatgccataaattaactccaaacaattaarctacatcttttgtctgctttggaagtttcagaattcttttcatttccaagagctattttttataaaatgtgtttttatgttaatatgcaatgggtttattagtgttattcctgaattaataaatattttttcagtttatcaatattatttaccaatatagtaaagactgatataacccacataagcaaaagctcttttttgtcttcaataattttttttttttttttgagatggagtctccctctgtcacccaggctggagtgcagtggcgcgatctcggctcactgcaagctccgccttccggattgacgccattctcctgcctcagcctcccaagtagctgggactacaggcgcccgccaccacgcctggctaattttttgtattttttttttttttttttttttttagtagagttggggtttcaccgtagccaggatggtctctatctcctgacgtcacgatccgccggcctcggcctcccaaagtgctgggattacaggtgtgagccaccgcgcccgactggtcctcagtatttttgaagggtataaaggggtcctgaaatcaaatagttkgggaacctctgatctactgtaattaaacaccatcatttcaatagaaaactgaaacttagatttccccaagggcgtagttgatgcatttaaataagcattttatcatcttctctcttttgacattgctcatcatgtttcgtatatctaagattgtgagctcttataaagccagtgctatgccatatacttctggcttatagcacaatcatagctacacaggaagtattcaaaatgtactcactgagtgaattattattcccgtaaatttcaaaatttcttctagtatgtttttcaaaaggtatacatagtaggttcatgcacaaagcacttaatgttgatttttttagcattcccatggcaagatcttataatttagtaatctgtaatcctattatcccaggataatcgctgttagtattcttgggtatattccttttttctttttcaatacagtttggagtatttgagtacgaccttatattttaataaattttcctcataatcaactagccatatataatatctgccactgggcagattgtttgtgacatgtcactttcaaagttactttgaattcttggcatatacaaatggccattgtgtggtgctgagtgactctgctttaggaaaggtggggatgcttctgttcaataatttcccagcaaagtatcccagacatgtaaacagttagtcattttcaacagtactaaaagaaaacakctcttgttattgttttaaattatcatcttcaaaagcaatataatatgtatgtaaagtgaataatataaattacaaaacaagtttttagctaacaaattagctgaagaatagcaggaacaagaatttcaccaggcttcagaattcatatgatgattcaacaggatttttgaatttgagtttcagattgagtgatagatctcacttataatttaaaacatacaaatgacaataacaacaaaaataatacagtttcttagcttgcagagtgacaaggattaaaatgttgcataatactcagtgttgctgaggataataaaaatgtaaataaacacaactatttagatggcaatatggggacatctagcaaaattaaaaggcatctatccatttacctagcaaattccttttattctgaaacatttacacaaatttgcaaaatacacatagaagaatgttatatcattgtttttaatagcaaaaattgaatgaaacctactgtctatcaattgtggactgtttttatgagccatgatatatccaggccactaaatctagtaaaattatcaaaaggattgaggtagagatataatgtcctgatagtgaatactctccaaggggtattgctaagatttagcatgcttcaatttttgtaatttctggacgaataagaagttgctaacagtggttacatctaaagtgcagggtggcatggaggaagaaaaaatataggtgtttgctttttgagaaatgatgttcatgtgttacttctataattagtaatagtttataaagagccttaagatgtataccttttgatccagcaatatgatattttggaattaatcttatgggaataactaggtatgtgtgcaaagccatggtcccataagatgttctttttgccttgctaataatcgtgaagaattgggagcaatataagtgatcaaccacagaagatgggttaatggaattatagtttgttattaaaaataatgtcataaaggaatattaatcatatattagrtgatgacccttggaaaagtatggacagtgtaactaaatatctaaaatgatatataccaaaacatgactagyggtggggtaatgggtgatttttatattcttctttttatttttaaatctatgtttcctaagtactctctaaagaacaagtgttattgctattaaaaagaaaataagcaattcaagtcrttttcagaaaataacaaataaaagctaggaagatattcctgctaagggtaaatcaatcttctcttgatattattagaatatctgattctatattattgtagcccaattctatttcatagttcagtaatgctaataatgctttgcttatgcaatagaatttatatgtaactgatgcattcataagaccttttctatttagcagtcaattcctttaataaaaatattttggagattgtatggtgaaatayttgggggatagtattttcctgttatacctatatttgcatgcctaaataacattaaattatcaatgcaatttggtatgatttgtcaatattctgttagtgctagtctggcattttataaatagatttatttattttgctaagatagacaaactatgaagcactgtcagttactttgtgaaaatttcaaataccaggtagtgaaacctaatagcacagttgtaaaaactgcatattattattttctgagtctctctgaccccacagcagtgcaaatgcttgcatttctctctgcttgacccaattgaatcatatcgttttaaggtatctgtccacccaacctaccatggataatgagacatttagaaaggcatataaatattagaaagtctttgtagtagaactgaataaaatgtattcgctcaaataccaatgtttttaaatagatacagcgttgcttcagcctcacctcctcccttcccaaccacataatgtgctttatttaaacaaattgaagttcagaggatcatttggaatttccctgtccccatatacacactttatcagcaggcatacatgtcaactgagaatcatatttaaagacaatgcagttttacaatgttatttaaacatcttacctgcgtattagcttaacacctagtttgtcacttagaaacttttgtgtcaaaaattattcatggtggtgaagacaactttcagattctgtcatttctatattgttttatgaagcacatacatatatgtatttatatttacataataggcaacaggtactccacatatagaattaaaaagtgagtacagaaggaaataaaagtttattttcatgaatagcatttagataagattgctgtccttacctatttagtattgggttcatattctgagaggatacaatttttgattttaggagtttggctattgttctcatctaaaaatatccaagattaacagcttcagatgcaaacagtgtcattagcagtctttcagatggtttaatacagaagctatctcttcctgcatttaatcattgtctcctcctggcatgcagtaattccttccctccacatgcagaacccccacatgactccatagttaccccaagcagtgcagaactgagcttgacagtttcygtatggtgcttcacactttggggaaatgtgggaatgaggaatgctgagagtgcacctttcattcctccaaattgatataggaagtggtgctggcagctgtctaactgtgraacatctgagcaggtgtgttaaaacttcatcttcacattgtcaaatgccaggtggcagcacttgcttgtttgtttgtttatcatttatgtcaaaataaacccagcagaaacaagagcctgtcaattcacatggcagacactgaccattcagatgtctgcctcagatattttctttcattttcagtgaacatgatttgcagcttaaaagatggattctttcttctagttttttacttctcattttgggaactgaaaaatcgtgaaagatgcttctaattatctattcacagttgtatatacctggaccctcaaccgtggctgtgttattcttttagacatagacattcaagttcaggaggtcatagaatggtaatcagagttgagagaggaagttataagaataattttattctcttgcttaattcttaagcatattaatcctttttttttttttttaaccctggaggatgttttagtagcctccagtgtgaaaactaaatactggttctgatttacttgaaccaaaactaaacgaaacaaaacactaaggcattaggtcagtgtttttgtacatttatgcctttatactatgtaaatactgtgtgctgtttagagaagcaacaagaaagtgatatgagtaagggatatataactattatttatgtttttaatttttctgcaggaaatagatctcttataagatgaaccagaaaatttatcttcccaagatctttgcaaaccaaaattcaaatgtacccagggcactacaattacattcctaataggaatttttacaacttcttaaatagtctagtattgaatatgcttgggggaaaatgtaagtgttaagaaagaacagaaaaaaacaaaaaaacaaaaaacaaaaaacaaaaaaaccaaaaaacagtctattttgccactgaagctttttcacatgcaaaaaaccaaacaacaacaaaaacagaaaaccaaccaaactccygcattgttgatagacatacctttttttttcacaagaaaacttttaaaaaagcaatttgcatatttctgcagaaacrtgaagctctgtggttcttttggttatgttgcagaattgtgcagaagtctctgcccagcaataaatgaaggcaaacttggaaaggttagctgcagggtctgcaggcagagaagaaggcctggaacctggaaggggacttcttaggagatgatatgaggaagcacagatarggaaggagggaaagacagtgacaggcagaaaatagggacagttcagatggtctgaagcattaaaaaagtgtaggcgttttcctttcaaatgaagtcagagagaaagaataggaatgagagaatgaatgaggccaatctgaggctaaaaaaagaggaatcttctcaaactgagcttctgtaataacagtagttaatatttcattgaacactgttctaactgctttaatgtatcatttcatcctcacaacacccttgtgaccagggtactactatcatccccaacataaatgagcagcctaagacccagacaggttaagtaactcaccaaaatcacatcctagtaaatggtgtatcaggcaggatcccaacaggggacagatagcacacttgtatttgtctgatttaaggagaccttaaacctgaagatccaggaaatagatatggctgtgtggatagggtcatctacaaaagactgagatctttagataaggaatgtagctggcccaaggtcactctgcagggagagaggtaggagtatcagacctcactctcctttcttcctgtctcctgccattgctccccactgggaggcaggaaggtaaggaagccagctgatgtgactcgcacaggccaacgcctcaggacacagcacagtgtaattaaggtagatcttggggtaagcaacagtggaaaagggatttgaactttatctggttctgggacagatgctcttaacaattacatatctgcctctctaagtgcaaagtgcttaggtagagctggtcccaatttaatgaagacctgaatggtcagcgaggggttactgtttctccagcactccttaaaagcacagtaggtggatgctggtagacatgcatctctataaaggggagagcttaggacaatttgttaatggtctggtttagatgaacttattcagtacctttgagaggtggtggagaggtctcctttttattttgttatctcttgtakctaattatgtttctcagcatagtgtgagccctgcagttgctggagatgactctccaggtaacttcagcatgacactctggggccagactgcatttgattttgctgccttctcacattctgtcccatctccacagtacwgaaagtacattcatttatgacacctcaatccatttccactccaaaaccctagtgaaacgaagtgccccactcacttctggaagatggctttcttctttccaaatggagcttcaggaatgcacgggaaaagaggcagcctaagcatttacatgtatccgtgctcccaggctgattcacacaaagcatcagcaacctgcataaatttagcctgtgagggcgattgtgatagttgtgagagtgatgactgatttcaatatgcaagtatttattgggtgcctaaatgggcaaacattggggttatagtgatgaacacaacagatgtagtcttatcatacttttgggattttacttttaaaagyacaaattgccagttgagattgaaagatgtgtcttttcttcccttagggaatataagagaggacaaagaattgagcttaaaagaaaatcattgatgtaagagacataaaaaaccatattgcataatagcctttttagcaaccgttacttaaaacctgacagtgaaatgagcatatataccatatggcatgtgtgtattatgcytttatcatattacttgaatgtacacttagctgcatcccattttaatgaaagggatttcttgctttctttatactcagagaattccctcagattcaactacacttagctgcatcccattttaatgaaagggatttcttgctttccttattctcatagaattccctcagattcaactaaaagagataataacagcaacaataatagtaatttactccattaaagatgaccastttatgctaarttccaaataactctcactacttaacagcagattttggactctactcaagaccttccagtttttcagagaatgagaagaacattctgtagaagcacaaaactttcaagattctctaggaattaatacaaatccaaatgcggttctgtggccaaatgtcagtttcatctagaaaatccaataaatagctatagagtactgactgtctgagaggcaggcaaccaggaaaaaacatgcggttaagagtacaggctctgagagaataattatgttttgggaactatagtatgtctgttattagaytctagtctcatgagttgttttttaagtttttttctgaatttagactaactctgcttattcatgtgaaaccaccagtgatctctggctgctgctyagaagaaacaaaaggaatgggtaatgtaaaagtcygaatcaatattctaattttgtccacatattggaatcaggtagcggtcccatatcagcttggttccatcagttgcccagttcatggaaagccttcttatttagtttacttgggataattttgcttaactgttgtgggatatattgctgttgtactctttgtgtagaaatgcaggataacggcttggcgcagtggctcacgcctgtaatcccaggactttgggaggccaaggcgggcggatcacaaggtcaagagatcaagaccatcctggccaagatggtgaaaccccatctctactaaaaatacaaaaaagctgggtgtggtggtgcatgcctctagtcccaactactcaggaggctgagacaaggttcgcttgaagctgggaggtggaggttgcagtgagccaagattgcaccactgcactccagcctggtgacagagtaagactccatctcaaaaaaaaaaaaaaaagtaaaaaaagaaatgcaagataagcttattgaatgttttcctaaattgagcacttattaatcttccaaatatcaccttttgttgaaactcaagatttatgagtggccctcaacatactgatgctttctgaccaggcttctctctaccctgaatataaaagaccttcatagttaggcagggatatcatatcatcgttcctattcagcctgaagaagttacagaagatggatcttcatccctctgcaacccttaggattaagggttctcttataaaaggaagggggaaaatgtcagaggcttttaaaccagagtgactttatcatgtatagaggctgggtaaaatgaggctgagacctactaggctgcattcccaggaggttagagcattcttagtcacaggatgagataggaggtcagcactaaatacaagtcataaagaccatgctgataaagcagactgcagtggagaagccagccaaaacccaccgaaaccaagatgatgacaagagtgacctctagttgtcctcacttctcattatacactaattataatgtattagcatgctaaaagacattcccaccagcactatgacagtttataaatggcatggcaatgtcaggaagttaccctatatgatctaaaaaggggaggaagcttcacttccagaaattgttcacccttttcctggaaaactcatgaataactcactccttgtttagcatataataaagaaataaccataaaaatgggcagccagcagcccatgctgctgctctgcctatgaaatagccattcttttatccctttactttcttaataaacttgctttcacttaaaaaaaaaaaaaaaagtacaggctctgaaatcacacatgtgaaagaaaaccttaggcaaatagtttaatttccaaagtcttagtgtccttctctttaaatggagatactacctctttcaaaaggcaattgtgaagatcaaatgacaacctgcacctagcacagaacctggcacatctgagcactcaataaacattccttgatcctaccagtattctcataatcaccatagtwttgtctgactccctcttttcaaattaagtggtactctgggatattggggttaaccctgtccaagggctgctttgttggacactgtcagtagagacagaatgtgtaagtttagcagtattttcaagtaaaaagcataaaggaacaattcagatggtagccaatgggtgaaagaagataaaataaaatattcagagaaattacctaagatacagtgcagctgctatagctttgatttatgactaacatcctaggacagagatggggaggaagctgataaacagaggctatgacctgctgtgggcaataatgtytcaggatctcaggtgccacttcacagatgggacataggtgttgcctggttgggttctgagtatctgggtttagtggggctgagctgagacagccaaagagaaagcacataaatatccaagggagagaatgtgtctggcttcagaccttacagatcaaaattgtctttccagataaaggtctaaaagagagagctgaataaatcaaacaagaggtgacgagaaattgaggaggaagtgaagcacagaagatctgagactgatatctgcactgggaagggatatctggaactctctctctctctctttctctctccatgggttctggggttgcacattggttgagataaagatgaatttcagttggaccagcagatattggagaatgatgagagcagcagttaaggaaggtaggggaaatattatgragcctactttagatcatgctaaggggtttctatttgagcctgtagacaatgttgatcagatttctgttttacaaagacaacccttaaatgcttcaccttatccccacagtcctaattaattgtctttgcttctcattcccacacagcttggctcttgccacatcgtgacttattttttattttttttctatgactatctttctccttccaactgtgaaatttcttgaaggcagaccctatgtctttgactttgatgccatgtttttttttgttttgcttgtttgttttttaagacaaagacatggcaggtaaaattcaaatttggatgacatccatgaaacatgagaagttcgtttctagaagctcctgaaggacttgggcttggggctcagagagtaagttgcttctctccaatactaaaatcaagcccctgggaatgggccagccaaattggacatgcagcaccaggagctttctgagagtatttttctatttctttttcatctcttttctccccagccttaccatgttcttgtccacagaggtcaacatatgtttagtacatgaaaggcggatacctcttctttgaagagtaatttgtggacagggccttcagagtagtgctttcccttgtgttatggtatccttgtgttccagggtggtaagctgctttggcaatgtggcagcccactggtctcctgggagatgcttcaagagtaagccatttcacaccgtgctgcctggggagctcagagcaaaccctggccatcagatatggccagtggagggcagcagagggctgcagagcatggtccagtgtccctctggaggtgatggaactatcaggacaggtatctgcatgtgagagtgcaggattgacaggaaaatgcctatcagcaatcaagaagaaccaatagattcttcggagaaagatcaggctgtagagatattgaggagctggcaccttgaaaaccctgaagtagattagggaatatcaatgggaaactagaaactcagcatgtggagtaaggaccagcctaacaccataacaataatacttctgccttctgcagatcaccagaggccagagctggatgagatgccttccagaggacctcgaagataacctcaattggcctttttgcccctctatctagcttagagaatgcagtggctctgggctctggaataataatctcctccccatccttcttcacttccctccccacccaaaccacccatttctgtctcatctgtggtttcatactcaactgtggaggctagtgccatacataggtgaaaactcaggttatcagtggctactcaacagcctcactagtggccaatctaacctcactttactgccataattagaagttagcaggtgtttctacttttagcctctgttttattggctttgcttactggctaaaacaggtcttgggattctttctgtggctgattaagtcacacatcttgacacctaaagtgatgttccagccaaaatatatttgcacatgtaataataaaaataatcatctgccacatatgagaaagagacagaaatctcttacaatttattttccattttatttttactcctgttagcaccttcactctagccaatggaatccgttgttgtgagttcctattgttagccttgatggctagatttgctgatattactggcattaggctttgcaacttatttcaaggaaagataacatttggatgtccacatttttgttcaaggtcactggccaattgtatcttatcaatgtctttatccttgtatcatctatatttattacaccttaaggaagcatcataaatatccttattggctagagcctcacttccttgtgaggcatctttttcaatgacttatccttgcctttctgttcatagttggttagcaacaggtgcagttgaataaatgggtgggtatgtgtctataagataagtgccatctccttcttttatcttaagatatttccatttcttcagctaaacaatggagatgattacaccaccatatgctcccctccttcaacagatgtaagtgtggggtcatcaccaaagaaagggtttgaggaccagttactcagccacacatcccaaatggcttaagaatctctgtattctggaagagaatatggccctatgagggccttcctattatatccagaatttagtgactttttcttcctattaccataatcacatccattgcattggacatatggtggcttagaggacagaattagaattaatcagtgagtggctattacagggaaacaaggactcaacttaaatagcattttctaagttaaacttgcctaaagattgatggggctgattcacaaggaggtgaactataatcctgggggttttaggtagaggggaagaccaattgtcaccactggttctctctgatggccagatcagattctttgtaaagtcttctgtagcacttgggacacataattattacaggcttctaaaatgggtttctaacaagttactactgttacctgaaatcatagccagcagaatagtgcaatgcattttaaaaacaatatctaacttctttttatcagatgaggaatatattagcattcattgagctcctatgtatcagatattgtgctaagcactttacatcctttaatgcttgcaacaaccctgttaggcaagggttattcttttcattccacaggtaaagaaactgagactcagagcatttaagtcagttgtctaagttcacatcatagtagaacccaaatctgtagccagatctctctgaatagctgtcttttcaacgcaccaggccaccttttatgaagaaataaaggctatgctgaccaaagctctgttctcctgagtattaccatgcattttagttgcaaataatatttaatacagtaatacataatcaaggagtattttttttgtcaatgactgcagggtaaacctaccttagcttcattctacattcacctcagaatgtgtgtatagtcagttttcacactgaatgtcagcaaatggagtggatatggtgctcaaagaaggcaaaaaataagtgatcatcttagatttacaagagttgcaaaaattttataaccagctatgctgtaagaattgtgagtgtggtcaagtaagactagtgaattcttccagaaggtagcagctttttcccttgctattacactggctgagtatctactcttctttagatataggatatgcactagggaagctgtttgaagactgattacaaatgtggccatgacaatgtggttaagtgatttcattaatatgtagtttaaagaacaaaaaggccagtgccacaccaaggaacatggaggtagcattttccaatactgtctagaaagctggagcatgtccaaatagttagcctttgggtatttatttcctttgtatgaaaacagacattgaaacttgctttgtattcatttgtttttcaggttagttattgccatttgctttgaacgtgtataaagggatttttcagaagtagcatgtgagctgtaacaaggaatcttatctggcaatcttccctgatctgtcactgaaggctaatctcaccacaggaacactgtcatacatcataaagatatataccctttccaggcattttaaaacatatttatttttccttcgttttacaaatactgactgtctacaattgttggttttaataatattaccagcaaacagttaattgcacttgctgtgtgcatggcatggttctaagagctttttatctcacaagaactctgagatgaatctcattttccagaagtggaaactgtataaagcttaattttttttcttaatagactaggaaaaaataargttaatcaaaatctctgcaagctttaaggttgatatttaatttaaaacaaaacaaaaacagtttcaaagtagtatattcccaacgttatctgtagagtcatatttattgttcaccttaatgttcagtcatcactaaagatttctgtagctaatcagaatcaatggagccactaaatttattgtgaaataaatgacatccctatgaaaaatactctgttctaaatatgacccaggacaaactctgaattagagctgttgcattttgtatactactgtacttccatcttcattaacacctagccagtctttcttctaacacctagttagcaactggttactgtcaaagactgctgtgtttcagttctgtccagaggagctagatctgtatttgtctacatctgtttccagaattgcaagtagtaacttttaatataaatagcttttcttaagtacaatgttttggggcctcataaaagcactcttcccttagacctgaatgtaacatcggtatggtagattcacctgggcttgtgccaaggaattactgttctgaagcttctcaaggtctttgttatagatggttctccctataagccatatcaatatatctctatattttcaaaatccgaaatactgttctatgctctcaaattgataccaaacattaaaaatctgaaagtcctcccaaattaggaatattgaatagctctatctataagttagtcccgaactaacttatagaactataagttagtgtcttgaagacactaagaagtagaatatttttatggttagktctctgagcttggaaatcagatggcctgagtctgatctggcctgtatgggcaactgtgggttaccataaatgtaatgtgtccagtgatagatgggtgctcacaggatagtagggagcccatggagaggggttgttggggtgatcagacccaacaccaggtcgtgggggtgatgaagtctggcggagtcaaaggattgagaaaaagacagtttgagaagtaaagtgggaccagggggccattgygattgtggaggctgtgaaggccctgagctctgggagcccacactatttattggtaatccaacaaagaaataggtggtgagaatgtggaggtcaaagggcacgttgctttaagcacatgatttacagctgggatggcttagcatttgctctgctacttgagataatggagagcaagttcttttaactcaaaatacaatcaatgctgggagagcaaggagccagcaagtctagacaaattccagagccacgagccctggattctatccaagtcacgagggattttatgccctgggcttagattatagtgcgtcagggtagccttccacctttagcacagagcttggtgttccaaaggccacaaggggttttagaccctggacctcagacatgttccaagactcttttacattatgtcagacatgcaagccctgcctcagcttctcccgacactcagctttacccaacatgccccccttctcttttttgtaaaacagaaggtattattattactatcattattactagctatcattatttctagcataaaaggtggcctcttttaattgagcaaggcactttcatgctctgcagcctttaattgccggttggtgatccagcttcatttttcttagcccttattcaaactggagtcgctctggtttgaatacttcccacacatctcccctttccctttttcaagaggacccttaattctagcggttgcagaaggatgaaggtccctcttctgtaacttcttcatgctgaataggggtgatgatactcctgcctaactgttcaggtctcttgtattcagggtagagagaagctcagtcagaaagcattggtccattaagcatctgtaggtaaaaccctggtgctccagcagtttttcagcttcctgtgcggttttcttgatctgttcccatgtcatggggattgcacctacatggttcattcatctcctgcaaaaacacaagcataccctcacctccatattagtaaatctaatgaaacagaagcaaaaacatttttggctgtagccaggaggccactgataatgagaaacaggccccttctaacagaaggcacagggaaagcaaatcaaggcttttcaaaccttcaattcacaccgtacaggtgggcccactagatgctgtggctcaggatagatcttcagatgtttcgtgggcacccacacaggcacctgatcatcacctgaagagactcaagtaaatcctcttccccatatagttatctttcctttttcccagctctttgtatatgaccatatttttttctaaggcctgcggccttaagatgagttaacgaatggaatgcttgtgccagcaaagaccgcagaaaccaatgcatccaccccttgattaagtttagttaaaggaccaaaaggtcctggagagaaaagaaagagcatttttatccttacctccctcccctccattccttttatatttgccctttgaaccatagctaatttccataattcagaatgttcttgtctgtccctgcaaatctctgctagtctttgctagtctctacttttgtacctctttagggcactgaccttatattgctagtctttgcttttgtacctctttagggcactgaccttatattgctagtcttcatctatccctatctgtccctgtggtacctgttagttcctgtgagttcctgcaagtccctatctctatttatctctatctctatttatctccactttacgtacttgtctctactttacttacttacttgtctctactttacttaacttacttatctctacttacttacttgtctctacttacttacttgtctcaatttatctctgcttacttacttatctctacttacttacttatctctacatctttcctggaaaccttttttatgaccctgggtagagctcagaaatccatgctttaagcttcagcaagagacaaaacagggaccctggacccagcaccagattgaagggaataggaagtgctgtctcctgcctaaagcaggaaaaccagagttaggcccttgcaaatttccactccacatcagagtcatcctcaatttcctggaataagttgttgatcatggcaattcacatatttagcaaaacaatgaccattgtaacattacaggccccataaagaacataaccaatattttcaatgaatttgtggttataattgatgaccactgatttcacttcagaaagtccaaatatagcccagaacattgtcttaaaactctgttgtgaaggcttcattttgttttccaccaatgtagtaggagtagaggttgaacattcccatcataaaggccacaaacaccacaatgaacacattcagcccatatcatgcctgtgtgctcattaaatctgtttttctctagcagaggcaggttaaccatgaaactgaagcttcaagatggctttacttgtcctatgcaaagcagcccatgatttattttttctggggactactgccaaccaggcctgtgtgtcaatctgtaagcatccaacagcaggtctactgtacaaataggtcttttgtcagatacttgattaacccaatatagagcctttcctgttggattagtactaccaaagcctcctgttcttttcactgtgctgcttcccagctttatgtcaacaactgagcaattctttctcctggggaagcagaccatgcagttgaggaactaataactaattgaatttctctggtataatcagaaccaatcattcctgtatgcacagtgacacccttcaaatttagaccagaccttctaagcaatagaccaactgttcctgagggcaagcgtcccctaactcccatagggaccttttttggtggctctccaggaagtagggagatgggaattgtgctgcagaggtccacagcagcactgcctgccacggcgggagacaattgttgccgtttgtaagggcactgactgtgccagatatgcctcggtttattgaggtgccctctgaataaacaaacctcagattccactgggtcttagcactaccaattgctccaggttttaatgttgcagctacaggagtggtaagttttatagctaattgattttctctcccattaaggagagaaagaggaggtggctattcacttaattcagcaggtggagctgacaggctagtaaaacatactttttttcagtttctctttcatttaatttcctccagtttctgttcctcacattcagaatctgaagttagttgtgtatgctcatcctcctcttcctcatctgaatctgccttatcrtctgtttgaaatggctcaagagctgcttttattagtgcccacattgaccaaactgagactggaatttttgtatcatctttatacgcttttttaaaatctctgccaattctctcccatttatccaactccatagtcccttgctctgggaaccatgggcaaaactgctttactgcactaaagagtgataagaaattctaagtactaactttcactccccctctttgtaataaatgccttaagaaaaataagcagaatgtctgctttcaatttgtcccattgttaccctcgttcttccaagtactcaactttcccgctgagcttcttttagacatcctcgggtgtcctttgacgatgtgtcctctgctttcatacgctctagcgttccttcaccagggtctttgtcaccccatgttgggtgccaggaatgtttgtgtgatcagacccaacaccaggtcatgggggcaacgaagtccggcggagtctaaggattgagaaaaagacagtttgagaagtaaagtgggaccagggggccattgtgattgcagaggytgtgaaggccctgagctctgggagcccatgctatttattggtaatccaacaaagaaacaggtggtgagaatgtggaggttgaaaaggcacattgcattaagcacatgatttacagctgtgatggtttagcattagctctgctacttgagatagtggagagcaggttcttttaactcaagatacaatcaatcctgggagagcaaggagcaaagagccagcaagtctagacacattccagagccacgagccctggattctatccaagctacgagggattttatgccctggccttagattatggtgtgtcagcgtagccctccaccctttagcacagagcttggtgttccaaaggccatggggggttttagaccctggatcctggacatgttccaagactcttttacattatgtcagacatgcaagccttgccccagcttctcccaacactcatcttttcccaggaaggggtggggtaaatgaggagaatgaaacagatagatagttagaggatcatttcaagaggatgagggatgagaaatagagaaagagagtaggaagaattaaatccatcagatattgggctgtgtaggtgatactgggctgaggtgcaggtaaggattaaggttaacagaatttctagaaaaagtagttcaggaattttactgggatctagaaaacattaagcactatgagaattgtgcttattgagatatattgtgatattgagaattttcttggggaacatgggctctgtgtctagagatatatttaaggaaaaactgggaccatagttttaaagaaccaagtggtctgtggcttacattggaacacaaaccagaacattcagctgtagagaaattcaaaggaagaaaaacttcactggaatcatgattcttcccaatgtatctttatagatttttgtttaaattcagagaagttatttctttaaaaggatgagtacttatttttaaaagtgcatataaatcattttttcctttgagatataataataatcttacctactcttgccaaactcttgtcatatttgaaccaatctatggcaggcagtttactgagtgccaaattcagtttccatttgctgttttaaaggcatggtagacctgaactttcttgaaagcagcaaatagatactgtgtttggtactcagccgagtgcaggtttaacatgacaggagggtgatgttttttctgttgatgtgcccaagttaatctgagttatctctccaaatacataggtaggtattatcaatttctctgcctaaatccatgtaatctgcagggttgacaacttctctggtgagagctttgaaagtggatgattccataatactctgtcttattgtttgatgagggtaattcacaacataaccctctgtgatgaggaatagagaggttaaaatgtgtactcaagttaactcaatcaatagaggactttgaaaccccatctttttcctctctctaataatacaaatcctgttgttctctcaaagttggtacaaagctgatctattcttagaagctaaacctgaccaactatacttaataatgcctaacatatcatatatagatattatataatattaatccttcttatatctcacagatcatagatatagatatacatctgtactaaaggtgttctcattactttattgtctccccaggtagattttgaacyatatagggtagagttccttgtcctctaattctttagtgctcccatgccctcttgttcattatagagcacactgtaggggcccaagagatccttgtttaaaatttaagactgcctatatcaaatgttggcaaagtgatggagcaattggaactctcattcaccactggtgataatgtgaaatggtacatccaccttaagtaacagttgagaaactaaaaaaaaaaatgttacccatgcaccatatgacccagccattccattgctagatatttatccaagagaaatgaaagcatatgtccacacaaaaacytgtaaacaattgttcatagtagttgtatttgtaacagcccagaactagaaactacccaaaaacctatccacttacaggtgaatggataagcaattctggtatawccacacactcagcaatagcaataaaaaaaaagggaaaaagctgggtgcagtgtctcacgcctgtaatcccagcactttgggaggccgaggcgggtggatcacgaggtcaagagatcgagrccatcctggccaacatggtgaaaccccgtctctactaaaaatacaaaaaaatagccaggtgtggtggcgggcgcctgtagtcccacctactcaggaggctgaggcaggcgaatggtgtgaacctgggagatggagcttgaagtgaggcgagatcacgccactgcactccagcctaggcgacagagcaagactgtctcaaaacaataaaaaaataaataaaagggaaaaaaattcatacaataacatggatgaatctcaaaataattattctaattgcagaagatagacaacaaataatatatattaatagtattccatttacgtaaaattctaggaagtgcaaactaatgtattttgacagcagttaatgtagttgcctggggatgagaaaacagagcattagataaaggacaacgatgaaactttttggggatatggaaatgctcattatcttgattatggtgatggattcatgggtatatacatatgtcaaatgtcatcaaatttacactttaaatatgttcagtttatttgtcaattatacctcatgaagctgggggaaaaagcaaaaaaaatttgtacagaaactattctgcatctccctttagtattccactgtctccatgttttcatggtgagaagctcctgctttgagacaatcacacagatgacgctgagcagattgggggcattcaggtcagacagagcttacatgatccaagctctgccactttatcagctgcataaccccaggaaagttactcagcatccctacacctgttttctcttccataaaatggagctaattatatgccaacctcagagggatgctttaaaaactaattagattaaatgtctggcacttcatagatggtagctatcactattagatacatgttattacatattgttaagcacttattttttgtgagactggcacaaatttactgagaactttctcagtttgattttaattctgctgattcccaaccaattactaataataaagcaactaacaaagaatgagcagactatggctcaaaatatagataatacaaaatcacttctgggcgcttatcttctccattctccatcacttgtgctaagctgagttggcaacatatgttcaagtgtgttcagatgttctcagtagagaataggataatacagagaaagtgtatcaggtgcaaagagagatttaataaactggtcgagaagtacttgaaaaagtatgtgttttggttttgacaggtatggctttaaatatgagctcagcctcttactacttacagaggaagccctggacaggttattaaacatctataaacctgagtttatgcatgtgtaaaatgtagataaaggtacacacatcacaaatttgttgtgagaataataatcatgttaatattagaaataattttaacgataaatatgtgcttaatggcctctacttcccttctcattctggatgaggccaattgcatagttaataatgataatcatgtgatttaacctgaccttgacggcattttaaaaacattgcctattgtaatgccctggtacagcattctgtaaactcattctggaataatcatgggtatgcgtgaatgcagggagaaatgagattacctgaactcctgaacccgctcattaatatttcttttaaggggagaatacctgtcatatttgaaacctaagctgaggagggtagctaaagcagtatttttgtttaaaagtagtgaagacaggtgccaaaacccaagcctctaattcctaaggcaattccaaattccttgaccccagctgtgtctgttgttgagctcatcaggtttaaaggggccacctgaggaggacttttaggactcagaagttctattagggaagtagaagcagaaagtgagccagatggagctggaatgtagaggactcgtcgtgagcggggagcccacttggtcagctcagtgaaggctctccctcagacgccaacatctacatgcggatatggaaggtttgccaacacttaccttctttttcttagctaactttccacagagtctgagaaaggtacatattgtaacctaacttttcaaaggaagaattaaattctagagaaacaggtagtgaagaacttcgctttgaaagaaattgtttgtaaagagttaaaaccatggactctgtactcagattacctgggttcagtttttagctttgccacttactggctgtgtggtctggtgccagttacttaatctttctcttggtttccctatctgtgaaatggtgataatgatagtgtctgcctcatagcattgttcccagcactgatatgagttgaaacaaggtggtcacaacagtatctggcttatagcaagtgctgtatttgtgttggtaaaagaagctgtggtgtattgggattatcttggttttccataactacatttgtcttagactatttggatagtaatgtctagtgaygttgtagtggtttttaaacacagatagtttggaaactgagggggcactgtgccttctcagtgtcccctcattggacaacactatttcactgttgttcaatgttttcascttaaagaacatcctccttccacactagaaggaggatgactattgtatgcctacgatacttgagtttatccctgtaggaaagtgaagaaaactagagcaaagtaaaattcagtgctaaaaagaaataagctatcaagccatgaaaagacatgaaaattaaagtgcatattactaagtgaaagaagtgaatctcaagagcctaaatattgtaagatttcaactatatgtcattctggaaaagcaaaattatggagacaataaggaggtcagtggttaccaggagttggggattggggaagagatgaataggcagaacacagagaattctgagggaggtgaaattactttgtatgatactataatgatggatacatgttattacccacatatccaaacccaaagaatatataagccaagaatgaaccctaatgtaatctatggactctggatgcttatgatgtgtcagtgtaagtttatcagttgcaatactgcaccactctggtgggggatattgttactggggaaggctctgcatatgtatgggcagtgggtatatgagaaatatctaaaccttcctcccaattttgctgtaaacctaaatctgctttattattaagtcttaataataaaagaatgcattagtgaattccagtacttaagtggattttttcatcccttcatttttcctcagtctctggaacttgtytctgtcttgaataattttaagcaaggattatggttgtgttctctcaggtctaaatttagccaccagattcaatcatgctacaaagctgtgcaactgaattagtgtttagctgtgatagaaatcccttgggaatcaagttccaattaggaaacttagataagcttgagtaacagtcttaggaataaaatgatttttttctttctttttccatatatagaattttccccatcaatacccactttgatccacaaaatttcctttaccacacatggtctgtctctcttatattacacatgcttgaaattgatcttatactttaatattattttctttttaataagcatagttttcagctgctgggaagaatatagatctaattatttcccctgagtttatgtacattrtgaaagaaaatttgctgtaattaaatcattaaagcactataacttgtagtaacatgagaacgcaggaaagtgaacaggttgaatttggcctccaatatcaaatggaactaaatttgaattctagcttcaccatctgaaaccttttgtcatttgataaattatttaacttaaactccaatcactttagctgcaaaaactgaataatagttggatctactatacatgatatttacatggctagttttaggcgatcatgattaaatgatatgacatatacaggtgcttagtgtattgcctggcatcaagtgaacacagtaaagagtaagtaacactgtatcattgttgttcaatgttttcagcttaaagaacatcctccttccacactagaaagaggatgactgttgtatgcctactatacttgagtttatccctgtaggaaagtgaagaaaactagagcaaagtaaaaacaggcacttaagccatatagcagaatagtatggtggttataagcttagacaacccaggtgcaagtcccagctccactccttactactctgagttttggcaagttgcttaaccttgctgtgcttcattttctccatttacaaaattggatccgtaatactatctattgggtagtcgtgagaattaagtaagatgatatacacaaggcacttggcgcatagaactggctcatggaaagcattcaaatatttgaattactaatattcaaggacagttgaggaaatcacagattgttagcctaactaaactcaagtttagatttggagttctaggaaatgttcaggagttttgttctactgtataaagatgaagttggcatctgctaatagtttctgccagccttcaagccaaactgactatatctgtgtgttaagcctttactgactgcttaagaattatagaaaatatgaaagtttaacacttaaggaatttgctatttaaagagacaagcctaagtcatagaaaataatttgaggagagcatcagataatacagtccaagtgtcaagtgatatattgtggtctgtaagaacaggattttttttttttttgagaccattccttgttctgtcacccaggctggagtgcagtggtgtgacctgggctcactgcaacctctgcctcctgggctcaagtgatcctcctacctcagcctcccaagtagcttggactacaggcatgccccaccatgcctggctaaattttttatttttttgtagagatagtgttttgccacattgcccaagctggtcttgaactcctgagctcaagtgatttgcccacctcagcctcccagagtgccgggattacaggcakgagccaccacacatggctagaacaggaaaaattgaaagatgaacttcaattgttcagtgtatggcaaataactaaaagattttggaaggtggtagagatggattctacttctagtccaacagaacagcaagagcaaatgtgtgggacacggtggaactgggcctggtacggagcagcagatgaatgataaaccttgggagaatcagaggatatctgtgggcaaatagtgggacgtggggctgggtatggcttatggggcaacagargacctgcagagagtcgagcttatggctcaactcacacccttccccattttgcagatgaggtgattgaggcatgaaaactatttctctgtgtcattattaattggagtcagagctggtgttaggtccaccttattagtcctgactccctggctagtgaacttgcaactgcatcacagtgtgggattagagattacaaagaacctggactggggaaattagcttgctgctatccccatggtaatttttctaattttgtagcttaatcgctgccctttttctatccacaccatattccctaaagcgaaaaaagcaaaggttrattcataggccactcaaacaaaggccttatctaaatccccatttgggaacattcaaccccaaacaagccatttggttattagagtgatggcttagaatcaggtattgattcccargcaacgtgttttctattgtatcacatcacttgcactttttactgtgatttcaaactcctctcttaagggtctccttatttctgtccctgccaggctaaatggyccagttttgttttgtttggttttcctacggtgtatttttctctctcacttttaccaactacctcaagatcaatgacacattatcctcttccacttaaatgaggctctcaggattgctctccctgtagctccctaagatctgctggtttggagtttatattctgttgggttgtgttcctgaattatgttggtcattagagtagaaagacgtttcccttctactctgagttacctccggcttaaaggttgcagatcttattgctgcaggagtcctttcttgataaaagctggagatttacctccttggagatccctgtttgctgctacattcttgtacattttcacctttacatttttcagttttcccttcctgcctctgtctgcccagcaggctctcaatgaagaaaggagcagcaggagagtcaggtaaatcctgtccattaacacacccaaggtttattttagatggctatgctgggaagaggaggcaggtcagaaaccgtaggcaaaatgcaaaagcagatagtgtgttccgtgactgaagttacagggatttaggaaagtttctctgatacgtttttccccctcatcagctttaatctctctccttcacctctgagtgggtgttaattacttcagagttcttttcttacctcacctcctcctcctcttcttccctcctttagtggagggtaaataggaattagtggggaataattatctcatcttctctttcaccatttattaccagcccacttccctctagaatctgatatactacttgtatgttgcaaattgctccagagtgcctggaagaaacatataatgttcacatgaatagcttatgcggtcagtattagagttgagagagtaaatacatgtatgtacactaaatcggagatctctttcactggatatatttaaactgggggacaaaaggcttgtagattctcttttgctgatcctatttgatgccatttaacacatggtttgtatgacaatgtcctcttttcctctgactttaagctgcttttatcaccttagtgaagcttccaatttctctacctttacttgttactattgaatcttttactcataaatctcttcctttctgttcaatttttggtcaataaggtcagcatatgtttattcatgaattgtatttattctgtgtgtttacttttaagaactttatgtacggaagcatgttgtgttattataagtcatactagcatggtgagaaattgaacgtggttacctggcttgcagcatctggctcttctgacttatagtcaagttgatcttcttggggtagaatgatgggtacctgaagctgggaagggtagtgggggcagtggacaggggtgagagatgtgggaatggttaatgggtctaaaaatatagttacatagaatgaataagatcaggtatttgttagtacaacagagtgattattttatataataatttattgtacattttaaaatataattttacattttaaaatggctaaaagtataattggaatgtttgtaactaaaaaaatgataaatgcttgaggtgatggataccccatttaccaggatgtggttattacacgttgtatgcttgtttcaaaatatcttatataccctgtacatatgtagacatactacatacccataaaaattaaaaatgaaaaagatgtgctcttcactgagcctgttccttaagtcttaagagcattcagagaagtggtgttctttggcagactgaggggcagttctggagagaaggaagtgcactgggcttrgaaatatgtaaaggcaagagaagcaactgttcagggagaggcactatgctggttttcactgccaggtgaaaaagaaagtcagggaggagaagagcacaggtcacaaggaatggaagttggagggacaagaaatacatagttggataggaatcgatggaagaaggaaagattaaaacaggagaatgtaaagtatagttagggacactgatagcccatactttgccttgggtaaattagaaaaggatgccagttcctctgggtggaggtggtcctgtgttggggtgtacagcttcgtgagcagagagtaggctgctttttagctttcatttgcctccttagttgggtgtccttgtgcaaggcatagcctgcatactggacatggcagcctggggtgaactgctcaagaatatcctctaaagagcagtctacagcttctagtatgtggtaccactagaaaataactagaggctaaaatgtaatgcaagaaaatagtttgcctctgaaatagtcataatgtttctttccataatgtattagggtttacaaatttcctaaacatccatgcctgatttgattcccaaaacagccctgactgtactgtcatacccactgtgtaaatgaacagacaggttcaagttatcaggttattcacaaataataagcaagtggcmgatgcaggatttaaatccagatcctctgactaaaatcctgagcttttctgctgtaccaggctacctacacagcacagagatagcatcgatgaggctgtgtgtgtgaattatcattattacccctcatgcatatgggcaactaagttatgcacatccagtcattaagacagctctgtcatcttgtaccatcttgtctgtcctagtattatttcccataatatggaaagtaggctatgggtcaatacagatcagagttcttgccactgaggtgattttgagaaatgaattcctgtgcctcaatttcctcatttgcaaactgaggtcagtattatctacatcataactcactggsttgttaaaagtcatggtcatatttctgaatgttaacatttataagacaggctatatttcacttactgctgtatcccaaagattagtgtagtacctggcaccaacaggtgttttatatctatctatctgcctgcttgtctattgaaagaattaatgaatttaaaggtttactgcatgctgggtgctgtactaaatgctttacaaatattatttatttctcatcacagagatgcaggatagataggacaacctccatttcacaagtaaggaaatcaagatacaagattggtcctaaatcttatgctcttagctaccagaattattaaatttgaaccccagccctggctctcactagctgtgtgacctctgttgagttacttcactcattagcaccaggcactctgatatgtgtgccacatctgttgcctgatttaatgctcacaaagtgcctgtgaagcaggaattatcaccctccagtgacagaggatgactaaggctcagagaagataataccttaccaggatgataaagctaaaaagtggcagaactaggatttgaacctgtgtatttccatttcaaatttcatgttttttccccagggtttggtaggattaaagttgrctcttcatgaaatgtgaccacttctgtgtgcctatcctaccaatgggacatagttgtcttttcatattaagggaagaggtctccagcaactgtttttaccattagaactcattataactatttacttaatgctttctaagtatcatttttttcatgttgtctaagtatcatgtttaatgataccaatgtcttcaaagggtgaagaaatatagattatttcacaacaaatacatgaaaaaaaaactacccattgcaaaattaattagtttgccatgaggcctcttgggatgaatacattataaagacagaactgtgttcaccaccatatggaatgttagccactttggctgcgcctctacatccttggaaagaagccagtggcattgtctcccatgcggtgagacctgtgagagtgtgcattgccagagctaatgaggggtgtgtgcttaaaggagaaaatgtcaccacccaaagacatgaaggagagagagaatctgactagttggtcctcagaaactgggcttacagttctttacaaactaaagcttttcatatttgtttactctatagacatttaaaaagctatcatgatttttagatttagactggaagaaaagataaattctcattgagtataggttccttttccccttcaggattgacagtgtggtgaggaggtagtcagataagatgccagggagtgattgcaaaaagaatgaatcgacagtgtgttacactcaaattgagagtgttgccattatattgccattttacttccaggtaagcatggaaatgtaaaccaagagttatatataattggccaatggagtgactatattttagaagttaatacatttttaggttcacagcaaaatggagccaaaagtacagagttatcatatactccttattcccacacatgcacagtctccctagaatggccattttgaactaaaagatgaaagtagatgtggtttcagaactaaggactgagggcctggaatctagacctgaatctggaatcagctagagtctatgatctgaaacagctggagagcctttccctattctgtacctcaactgctcacaggaacaagtggaataagcatctgccacaaattgccattcgatggagttaataagacaaagcttgtgaatctataacctcctcaaatgagagggatagtatgagtacaaaaggaactagaaaggtatcattacttccctatccacctacatccctctctactccccactttgtgtcaccaaaaggactaaggttttaaacattctcataaaaattgcttttgaagaatagattctgtttttttctagggaaacagaaaataaggtgaataagtagagaaagtggattgctgaaatgtacagaagccaatttgagttttattcattcagcaaatgtttgtagaggtctactgtgtactagactctggttgttactgagcagaaaagttgtaggtatttgaaaagccagcaaggataaaatagccttgaatcgttagggtggaaatcggtatgcaaaatgttcttcatatctttacacgtattggcaagtggctaaaaggcagcagaagatgccttacgtttttacaaaacaggctgtctccacaaggactttcccccayttaaatagctcttcatcatctcatctgttgtggaagactaaatagccccttctagaaggtacaatatgcagctatttaatgacacataataacctaacagaagccagtaaaattgttatacccttagatagtgtggagcagartagggataaaaagataataaccaattacttacaatggaacttggccaatgagttgtggggaggatgatttttgtgaaaagcataataagacttactgaactcccacagtttggtgtgtatgtactctgtctagtctagtaggaaggacagtacagtactaggatgataaactaactggcaatagcaagatgcaaggcagatgtgagaaagaggtggaaagtgtgctctgtgagataagcgacctcaaggtctgccagaaggcaacactctctgcttagaggtctcatgatgatgacgcctagcaggaatcctgtgacaaaaggatccgaatatggaagtttctgtttggaagaaaatatgacatttctgtataatttaactctatgtaggagtgtcatattctttcaatatgaattccttgactagaaaataaacattaattaccaaccgtgaagaacatggcatgttatacattgtgaagagagatcagtctcctaggagaatctatggaaatctcctctggcaaaagggaagattccacactgtgaaagtattggctatgtttcatgttatttaatcattagcatcataaattcttaatgactaggagggttgatataacaaaaatagctgtaatttattgagcatcctcgttatgccagtcactggggtaagcatttgatgtgaattatcttatttaattctgggcacgatctatgaagtagacattattaccaatggaggattagagagattaagtactttgccaaaaaccacactgcaaatggcaaatcttactactccctgttagatgaaattgaactgaagtaaaactcaagttcttaacaataatggtgmatttttcctaacatatgataagcaggaggattctatgttgtatatggatgagtatttaaaaacatttattgaacaaggcttagaaaagaatccaacccttagttcttagaatgagactaagtaaaaatagtagattgaaagttaattatctagcaataggatggacatgggaaagacgtaaagaagtatgtgagtaactgagattggaaaactgcatgaaaacacacatctttacctgaacctccgtcactgacaccttctattcccacactccctagaatttcagtccctatatccacccagtgattccccaccccagatcaaccccattgttgactttctctactgctgctcctttgttgcctaacaatatagaaaataaaatgcataaccctgctaattggccagatcactgcagatttctcattcttgggcccaattggttctccctgttcagccaatctactttttatcttccagtgtctagtccaaaccattaccagttttctgaatccaaatctatctgatcatctctctcactaggtgatcccaactttctccttcaccaagagaatatctcattagactttatcttacaygtaagtgaaaggaggtacagaaagtttaagtaacttgcccaaagtcttactgctaataatagtagagcagagattcaaactttgtcattctagctatagactttgccctattaaccattataccattctgcctctctctggtcatrcattttgagtgacttaatacaaaaaatgagtagatgggttaaagacccatcagaacttgaaacttgtgctgtttctggcctatagtagccaggacagctaggcttgtacttaaatgtggcctgaccccacatgcttttgtttggacttggttttatttggatggccctttcatcagggataagaggaactcctacgaggaatttcctctgtgattagtctttgctttgtcccagcttgctgtgtggccasaatagatgctccccgtatcttcgcctgcttcagctagttcttctacattccctatttaacttgaggacattcacccagataagaattcaggaatagtcccagaatccttccagktctctcctaaaactcactctcttgaatctgtctccttttttcattttccactgttgtttctttaattccttcatttggctgctgctgctttttttttccccttggcattaaggattcagtgatgaacaggacagacaaagcccctgtcctcaaggagttcccattatagtgggcagaggatgcaactgagatcagattgtgataagtactatgacaagtgttatgagtgagaaaagcaaactccagagagtggggtatagtgggttggcctgagggtattaaaagcttctgtgaggtagatgttcataaatttattgtgcaactagagatccaagttcagtgatttttttttttctcttgtaacatttgcctggttggatgaggcacggagaaagtggatggatcaatggctttcttcatttcctcgtcatctcttatttggccccattacatccagttcctgcctgtctacaactccatattaatgccagcatgttctttgtaaaacacagttgtgtcatattgttgctctaactagaaatttctaatgccctctayttatagcattggtttccagacttaagtctatcaaatcatctagagagattaccagacagactagaggctgcctcttcatccttcatgtctttgtcaacttcttcttctgtaggtctggggtggtgctatgggctgcattgtgtctttcctccagttcatatatcgaagccctaacacttcatctctcagaatgtgactctgttttaagccagggcctctaaagaactaaagagcttctgcacagcraaataaactaccattagagtgaacaggcaacctacagaatgggagaaaatttttacaatctacccatctgacaaagggctaatatccagaatctacaaagaacttaaacaaatttacaagaaaaaaatcaaacgaccccatcaaaaagtgggcgaaggatatgaacagacacttctctgaagaagacatttaygcagccaacagacacatgaaaaaatgctcatcatcactggccatcagagaaatgcaaatcaaaaccacaatgagataccatctcacaccagttagaatggcgatcattaaaaagtcaggaaacaacagatgctggagaggatgtggagaaataggaacacttttacactgttggtggaactgtaaactagttcaaccattgtggaagacagtgtggtgattcctcatggatgtagaactagaaataacatttgacccagccatctcattactgggtatatacccaaaggattataaatcacgctgctataaagacacatgcacacgtatgtttattgtggcactattcacaatagcaaagacttggtctatcaatgatagactggattaagaaaatgtggcacacatataccatggaatactatgcagtcataaaaaaggatgagttcacgtcctttgtagggacatggatgaagctggaaaccattattctcagcaaactatcataaggacagaaaaccaaacaccgcatgttctcactcataggtgggaattgaacaaagagaacacctggatacagggtggggaacatcacacaccggggcctkttgggggtggggagcggggagggatagcattaggagaaatccctaatgtaaatgacgaattaatgggtgcagcacaccaacatggcacatgtatacatatgtaacaaacctgcatgtagtgcacatgtgccctagaacttaaagtataataataaagaagtaattaagttaaatggggtcattggagtcagccctaatccaatgatgggtgtccttgtaagaagagattaggacacagagacacacagactaaggggtgaccatgtgaagacacagtgagaaagcagccatctcaacccaaggagagaggtctcagaaaaaaaccaaacctattgacacattaaccttggacttccagcctctagaactatgagaagattaatttctgttcttgaggccatccagtctgtgacattttgtgatggcagccctagcaggcaaatacaggtgggatctgagaatctgcatttctaacattttcagttgatgttgatggtctagagaccacactttgaaaactactggtctgaagaacattttgctaaatccttcataaactggtctatgtccaatttcatttccccaccttctcattcacttatataatagtgttctaaccaaccacactactcacagcactttcaacatgccaaatactttttcatctgttacctctgctcatgctgtttctcttgccttaatacttattcccctttctcaccatggtgagaaagtccagacctatcatatagtgtttgtctttctgtgcctggcttatttcagttaacataatgtcctccagtttcattcatgttgctgtaactcacagaagcagaaaggaaaatggtggataccaggggctgaggggactgaggagatgttagtcaaaggataccaaatttcagacaggaagaatcagttaaaaagagctattgcacatcatggggactgcagttaatagcaatgtattatatacttgaaaatagctaagagagtagatttaagtgttctcaccacaaacaaatgataagtatttaaggtagttcatgtgttaattagcttgatttagccagttcataatgtatacaaattttmaacatcatattatacacaataaatctatacaatttttttttgagacggagttttgctcttgtcactgagactggagtgcaatggcatgatcttggctcactgcaacctccgcctcccaggttcaagtgattctcctgcctcctcctcctgagtagctgggattacaagcacctgccaccacgcccagctaatttttgtgtttttagtagagatgggtttcaccatgttggccaggctagtctcgaactcctgacctcaggtgatccatctgcctcagcctcccaaagtgctgggattacaaatgcaagccaycatgactggcaatrtatatgatttgtcagttaaaaaattaaaaaataagaatcagaataagaaaagaaatgtcaggccagatgtggtggctcatgcctaccatcccagcgctttgggaggtcaagacagaaggatggcttgagaccagcctgggcaacatggcaagaccctatttctaccaaaaaaaaaaaaaaaaygaaaatagccaaatatgctggcaagtgcctgtggtcccagctgctcaggaggctgaggcaggaggaccccttgagcccaggaggttgaagctgtaytgagccatgatggcaccactgcattctagcttgggtgatagagcaacagcctgtctcaaaagaaaaaaaatattccttaaacataacctctgagaatccttccctcattctactatttagataaaattaattactacttccctctgtctcccatagtgcttcatatctcttggcatttctcatagtgtagcataattttttatgtgtctcttgctttgaggaactatagtttgtttgctactgcatccccgatgacttgcacagggcctggcacataacagatgctcaataaatgtttgttgaaaaaatgactagttaggcagttagattcttagtgtggttggagaagagccttcagaacagtcttgaatgaaaaaggggtaatacacttcatctcctcttataaggatacctgatattaagcctccctagatggaggcccatgtagtggaaagtataggtctcctagaacactccaaaaactaccagccagtctaatttaagagactttctgttaactatgcagaaagaaaggcaggatgtttcaaaatcatgtgtcccatgtcctgtccttcttttggattacccgggaattttagaaaccagtgaagtaccattattgaaagcacagctaaacaaactggctgaacaagcaagttccaagcacgaagtgcagaaggaatgagttcccttactccccagtaagggcctaagaagcaattaacaaaatgttctctgcctctaatctccctctcacccccagccaggacacagtacattgcctgagttctcagtgatgacacaggccatcatcctagggtcaagaagcttaaaattctgccagaaacacatgacattagaatgtgaaaaatacagagatgctttatattgcgatattgataattttgcaattgtaagccttgttctgattccacgtggcattaagaattttaagaaacttctgtttctgatttatgctgcttaattaaaaagaactaggatgttgttaaggctgtgttgttgggtgaaatgtcgctatgacatttttaaaacagtggagtcacggctcagctacctgataacgttaaaactaaacagaaactatatgtgcaggctgagagtaacttccctacaaaagaggtcctgtgcttggaattacctattggctggtttgatggcctcatttgaacttcactcacaagttgttctctgtggctcagagcagaattctacctcrtgcttagtggtctagtatatttccaatgtctgcacatttataatttgtaaggaatgtcttgtatttgttcacagtaagggctccttgtgagaattacccattttctgtctttgggtgggttttacaaaaatagccacttttagtcttatgaaggcacctatttcttcataatattaggggatattttgaattactctgggaatcatgatgatgaattttcatactaactgcctttttggctcatcctgtctttttagtaatacttgctcagtggggaaggagcagaatagcataaagcatagagaccgatgaattaagaagacgggagagcaaaatttaggagaaaaagagacccaggaaatggacaaagagaaataaattccagggaaggagaaggaaagagggggacatatgtggagaagagagaagacgtagtttcaggaattggaggtgactgtgcaggaaaccagcagctcatacagcaggtattttgggagtgtggggggaagggccccaggcacccatttgctgtttacacatctcatgctctttgctattcactttactctcattatcctgtcaaatcctccgaagaaccctgtgggatattaacatcctggttcagtgaagttaagtcacttgcctaatgtcacttagtaagtggcagaaatggaatgcccaggagtgttctgacctcaaagcccattcttatggtcaagtccaaggggctttctttttcctggctcagggcattctgcaaaccatggtcataactgaagtcaaatttggatgcccattcacttgagggtggatattaggagagggtcctacatgtgtgcagttaggctgtcatcaacctgcctctctgctccragtggacggaatggagtttcaattgcctagggtgccttgccttagtataactgygaggtgggtaaatgagttgagtcttccatactctctcctctggaatgtacctcccttggaccctcatacagtaaatgcccttgtgaccaatcttctttacttcagtcccatatttcactggctggggactctgccctcttttaaaggaaacttaagtgccactggttatctgacttcaaaccctgcccggtcatttgccttgcaatgaaactacatatacaactcctgcaaaaagctcttaaagagtaagaaaattgctagcagctcccaagtaatcagacctggaatgtagatcctccaccacttttctctcatctcattttcagccatttgttggaactgtttcttcagctctcttgttgcctcatggaatkaatctccaacattctctccagctgtattccctactcccattatgtgaggttaagccctttctgtcttttgttaagcccctccattagcattgtaaatagccccatgtcagggtctcttcattgttcctcttaaagattttttgccagattattcttacccaaaacacaatgtaggtcttgctgtatgttcacttggtcacaccaattgcagaataaaactcccacaccttagtttggcttttgaagccctccacccagtcccacagagactcatcccaccttaccttctagtactctccaatccagtgttccctattccagggcatatttagaatttttcccatttctttgcctttattcccacaattccgtctgcttggaagtcattctcccttcatccccacatgtccaaatctgtctgtaattccaatgccagatatccccaaaaccttttattagcactctcttccccatccttctggctgaagtgatgatctcccactatcttttatttaaaactctttcaagacaattgcatttttaaatttgtatttgaaatatctaggtaataagcaccagtgttatgtattcttgcagaaatttgctccacagaattatgaacagttgacacgttcttcctgtgttttccccacatgtgtgagatagtgggaaaacactgttatcagagctatgtttaaaaggaataattaccataaaactctatacattacacatccagaattaagtaaagcatagacactggaatataacaggtactctacagatatttgtgaatgaatgaatacataagcaaatgaaaattcctcaagagttcagtctttaaaaatccctaaccttacaatcattaccatgttaaacacttctgggacttatctatgaggactccagaactctataagaccccacagtcttatggttatcgggggtacccatgtgtgcaccagatattccatctgggacctgtgggctttaccttccctaaagtaagttccatacctggcttacactagaggtggctagacaatgagaatagtttggctggttataaaattctcaggtcatgttttcatttctttagaattttatccatggtttttcattgtattctacagtctattctaattcattacgttgtcatatatcttctatatgttgctagaaaggagtcagaagccaatagaagtttttattctccttgctctttataagtgggcatccatagaatattttttatctttggagttcagcaacatcatcaatactatgtcaggctttcctagggaaagatatgtcttttttatcttcagtttcaaatctttattccaggcttattttcttcttttaaatcttttaatatttgtattccattttttctgttctctttttcaggaacaccaattataggtrtgtaggattccctttgacttctacatctatcatctttataaaaatgttaatatcttcgtttttcttaacttgttttatgtcatttctttaagcctcttcactgtatccacagctgtttttcagttgtgtttattttatatatgtgcttttaatgggactttatcatgcttttatttttattttccatttctctgccaacttactctttttatcatcttctataatctcatagtaatcacctatttgaaattctgtatctcttctttaagctcattctacagctatatgaaatatttttgtgtcttttgagatttatttgtagaatccttcctttttatctgatggttctttttctgttaaatgatcttaatccaatttttcttcttttcttctttrttggaggaattcagttttgtttaattttgcttgctttagttttgtagttttatgcataggtctcaagttggtgcctttttgtttattagttattcttgatttgggctgctagcttctgaagaatatatttatgtacaatgaaagagaacagttaaattggagcattctgcaactttagttgagccttcttatgtcaaaagccttctcacaaaatctgttatgttttgtgtttgttatttattttaatcttaggcatctgatttcaatttttgtcactcaaaaatctggtgtggtttttagcaaaacctctaagtcatagttggttagtgtcatgatctggggatggctgcctcttgtctctctgtcatcctgttctcctctgactgtctctatcaactaggtggttatgcggtggatcataggaagagccactyggcttgtttccacttcagatccagctccctgctgatctgtcaggatatgacctgcttctttatgatatgtttgtgaactcagatctcattgcctctaacaaaatgacatttcaacatgcctttaagggcagtggctctcgttctcggtgcagtctgctttctacttgagttctgaggcatacatgttcactcttacatatacacattttacatgattggtctgctgtagtttatacttgggacagcattgccatttctatttaaatgaattttttcctktaatagtcttaaacatgtggtatttgagagaacagaataaaatggaaacacctttacatctttaagcaaaggtccagatggcatgtttttaaaggtcaaatcagatgaaaagaaagccatgtgtggattatagaaaatagtctataaactagataacaccaaagtaatgggaatttgttgcccttatgagttggctgtgtaattctttggaacccttctcagatgaaataatggtggaaaaacaactttaaaatgtaggaaactaagtataaggtggtaatattctctatagaaaataatttatgtaagtcaaatttatcctaagaaacttagttgctggaatacccaaaggcctttttatttatttggcttcaaatatttgtacttattatcaaaggaaaatatattagtgtccttaagcagaggcaaatagctattgcataaatgtgagataaagccatgttgctttgatgtgttctagaatcatacagaatagcagagcagcatcctaagcaatgagctaattgccaggttctctgacattctggatgaatgyttgagcatgtaycaatgaagcctcctgtgtggcagtattacttgtcaccctcccctaccattggtttacaaagggatggcaactatgtagcacttgcgctgccacttctctctctcccagtccataaatgagtgctaattcatgatcttacccttaggtcgaacatggcctcagaatctttcccagtacaaaacttaaagcactactataaatccattcaagttggtgtgacaraagcaatcggtttgccactctttgtctaacttgccattggacttcctgatttgatgatcttccaaaaataatgatgagccagtagaaatgtgtgaaattatacatagaaaatgagattgtctagttctagatccttgaggaatcgccacactgtcttccacaatggttgaactagtttacagtcccaccaacagtgtaaaagtgttcctatttctccacatcctctccagcacctgttgtttcctgactttttaatgatcgccattctaactggtgtgagatgctatctcactgtggttttgatttgcatttctctgatggccagtgataatgagcattttttcatgtgtctgttggctgcataaatgccttattttgagaagtgtctgttcatatcctttgcccacttttcgctggagttgtttgttttgttcctgtaaatgtgtttaagttctctgtagattctggatattagccctttgtcagatgagtagattgcagaaattttctcccattctgtagrttgcctgttcactctgatgatagtttattttgctgtgcagaagctcttgagtttaattagatcccatttgtcaattttggcttttgttgccgttgcttttggtgttttagacatgaagtccttgcccatgcctatgtcctgaatggtattgcctaggttttcttctagggtttttatggctttaggtctaaaatttaagtctttaattcatcttgaattaatttttgtatatggtgtaaggaagggatccagtttcagctttctgcatatggctagccagttttcccagcatcatttattagatagggaatcctttccccatttcttgtttttgtcaggtgtgtcaaaggtcagatggtggtagatgtgtggtattatttctgagggctctgttctgttccattggtctgtatctctgttttggtaccagtaccatgctgttttggttactgtagccttgtagtatagtttgaagtcaggtagcgtgttgcctccagctttgttcttttggcttaggattgacttggcaatgcgggctcttttttggttccatgtgaactttaaagtagttttttccaattctgtgaagaaagtcattggtagcttgatggggatggcattgaatctataaattactttgggcagaatggccattttcacgatattgattcttcctacccacgagcagggaatgttcttccatttgtttgtgtcctcttttatttcsttgagcagtggtttgtagttctccttgaagaggtccttcacatcccttgtaagttggattcctcagtagtttattctctttgaagcaattgtgaatgggagttcactcatgrtttggctctctgtctgttactggtgtgtaagaatgcttgtgatttttgcacattgattttgtatcctgagactgctgaagttgcttatcagcttaaggagattttgggtggagaggatggggttttctaaatatataatcatgtcatctgcaaacagggacaatttgacttcctcttttcctaattgaatacctttatttctttctcctgcctgattgccctggccagaacttccaacactatgttgaataggagtggtgagagakggcatccctgtcttgtgccagttttcaaagggaatgcttccagtttttgcccattcagtatgatattggctgtgggtttgtcataaatagctcttattattttgagatatgtcccatcaatacctaatttatttatttattgagacagagtctygctctgtttcccatgctggagcgcagtggcacaatgttggctcactgcaagctccgactcccrggttcacaccattcttctgcctcagcctcctgagtagctgggactacaggtgcctgccaccatgcctggctattttttttgtatttttttttttttttagtagagacggggtttcacygtgttagccaggatggtcttgatctcctgacctcgtgatccgcccacctcggcctcccaaagtgctgggactacaggcgtgagccaccgtgcctggcccatcaatacctaatttattgagagtttttagcatgaagggctgttgaattttgtcaaaggccttttctgcatctattgagatgatcatgtgsttttggtctttggttctgtttataygctggattacattgactgatttgtgtatgttgaaccagctttgcatccctgggatgaagcccacttgatcttggtggataagctttttgatgtgctgctggatttggtttgccagtattttatwgaggatttttgcattgatgttcatcagggatattggtctaaaattctctttttttgttgtgtctctgccaggctttggtatcaggatgatcctggcctcataaaatgagttagggaggattccctctttttctattgattggaatagtttcagaaggaatggtaccagctcctccttgtacctctggtagaattcrgctgtgaatccatctggtcctggactttttttggttggtagrctattaattattgtctcaatttcagacctgttattggtcttttcagggattcagcttcttcctggtttagtcttgggagggtgtatgtgtcgaggaatttatccatttcatctagattttctagtttatttgcttagaggtattcataatattctctgatggtagtctgtatttctgtgggatcagtggtgatatcccctcaagtatctagaactagaaatatcatttgacccagccatcccattactgggtatatactcaaaggattatgaatcgtgctgctataaagacacatgcacacgtatgtttattgcagcactgttcacaatagcaaagacttggaaccaacccaaatgtccatcaatgatagactggattaagaaaatgtggcacatatacaccatggaatactatgcagccataaaaaggatgagttcatgtcctttgtaggaacatggwtgaagctggaaaccatcattctcagcaaactatcgcaaggacaaaaaaccaaacaccgcatgttctcactcataggtgggaattgaacaaagagaacacttggacactggaaggggaacatcacacactggggcctctcatggggtggggggaggggggagggatagcattaggagatatacgtaatgtaaatgatgagttaatgggtgtagcacaccaacatggcacatgtatacatacgtaacaaacctgcatgttgtgcacatgtacactaaaacttaaagtataataaaaaaaaaaagaaaatgagattgtctaactgtcaggaaacagtctatttgcttgttttccaggccatttgagtagggtgactgacattcaatttaaatatttattgatgccttctctgggccagtcctgctgaactggagaaaggagattgttttagtctatggtgtgctgttataacaataccagagagtgggtaatttataaagaacagagatttatttcttgcagttacagaggttgggaagtccaaagttgagaggcttgcatctggtgagagccttcttgctgtgtcatcgcatgaggaagggcaagcaagcatatatatgcaagagattaaggagagtgaactcatccttttaccaggaacccrcacccgtgacaacagcattaatccattcacaagggcagagcccccatgacctaatcacctcttaaaggccctacctctcaacattgttgcattggggactaaatttcttttctctctctctctcttttttttttttttagatggagttttgctcttgttgcccaggctggagtgcagtggtgcagtcttggctcactgcaacctccagctcccagattcaagtgattctcctgcctcagcctcccaagtagctgggattacaggcatgcgccaccacacctagctaatttttgtatttttagtagagatggggtttctccatgttggtcagtctagtctctaactcccgacctcaagtgatctgcctgcctcagcctcccaaagtgctgggattacaggcatgagccactggctgggccgggggattaaatttctaatacatagattttggggacacattcaagcaagagcaaatatgaatataatataggccttgtctttaaggagtcagccaattagtcagctagtatttatccaacacttcttctggcagatataatacttagcactggggttatagcagagaacaaaagagatactgaccttgtcctcatgaaatgaatagtctaaaaggaagatgggaattcagcatatataatggttaactaacaaatacataaagtcctacaaagtagtagactgtataccactactttcatttgaccatgggttccgagtttgttgtgggtggagaggttttctagctaatgttagagatagctgcagaaggccaggcatggtggctcacacctgtaatcccagtaatttgagaggccaaggcagatggatcacttgagctcaagagttcaagaccagcctgggcaacatggcaaacccccatctctacagaaaatacaaaaatcaaccaggtatggtggtgtctgcctgtggtcccaactatttgggggtgctgaggcaagataattgcttgagtctgggaggcagaagttgcagtgagccaagtttgcaccattgcactccagcctgggtgatgggagtcaaaccctgtctccaaaaaaaaaaaaaaaaaaaaaraaagaaagaaagaaaaaaaagaaatagctgcagaagcaaactaatagaatttggtatgctacatacrgtaaaatagttatatacaaagaatagaaaaaatatgagacataataattaattctgtcttatagggtttgggaatcagagaaagggaatacctgagggaggttttaatgaatgaatggtatgtcaatgggaagaggagaggggaaggctttccagatggaggaaatagcttgagttcaaaaactaaagacagctattgcctagtatttgcagagaaatataaatgattctgaatggcaagcattaggcaaggttaagataataaaggtccctatatgacatataaagaagcttaaactttgtctttatatactggtgagcctgacattgacatggtcccacttattacagaaggatcatttggtagcagtattgaggaaggattaatgggtggaataaagcctggagataaggaacataaataggttattataccatgtgaaggagctaatgaggaattataatgacctatttcaatcacagatttgaaatgacagattctaaatacctaagccagcttacactttttggtccccacttcacctgatttttctatgttaatgaagatggaaaggagagaacaaatttgggaaatattcaggaggtaaaattcacttgccaagtgattgattggtcatgatctttaagaggtaggatgggtgattaggcatatcaaggtttcactaagtaagatgcagattctatgagatttgagctcaaaatctatgagtttagtcttggatatatgaactgtagacatctataaacattcagtaaatatgtccggttgggtggtgcctatatgtgtctaaatttaaaagagtcatcaatcctgaatatstggatttgagcattattagcatattgtgatggttaaaaccatgtagataaatgaaattacccaggataagcatatatggtgaaaagaaaagtctgagaagaaacccctggggaatatcggtacttaaatagtttgcagaagaatagactccagcaaggcagcctacaaagaaataatcagaaatgtaagaggcaaatcaagagagtggtgtcacagaagtcaaggtaaatgaaacttataggggccgggcrtggtgactcatgcctgtaatctctgcactttgggaggctaaggtgggtggatcacttgaggctgggagttgagaccagcttggccaacatggtaaaacaccatctctattaaaaaaaaattaaaaattagctgggcctggttgtayatgcctgtagtcccagctactggggaggctgaggcacaagaatcacttgaacctgggaggtggaggttgcagtgagccaagattgcaccattgcactccagcctgggtgacagatggaaactctgtctcaaaagataaaataagtgwataaaaaataaaataaataaaaaaacaagcttaaggaagatggtttctacagtgttacaaactacagtgaaatggagtaaactaggggcagaaaagtgttagttgggtttggcacttaaaagtttgttgttatttagtaaaaaaagcttcaatagagaaatggtaaagaagccagattgcaattagtaaagatgggaaaattacaacctcaaagcactatttagatggaatgaaaaggaaaatggagggtagagttaggaagatatctggaaagrgatgagagagggtttcatcacagtgaggaaagattgtttcctaggaagaagaagaggtcaatggaggagagagtgagatggaaggtgataggaccagaattcaaatgaagaagctggctttcatctcagtttggatctttccagaaacatgccatgagacaaaaaagcagatacaaatagtttctttggtaagccgaggaaatatcagtagtggagtgggacagtgagaaagggaaggaagacagctgacaaaggataaactgtcaagtcagctatcatcatgagtcgctggaacttaactcagtgggaaagtctgtaacagtgtaaaatgcatgcctcagaattttctcaaccaaaaggtgggaaagctgaggcatttttactccaaataccttcaaacgttggttgagggttgcttcctggagttttacttctctggcacttctagcctgcattgcaggtgactgagcaattatcctctgcttcaggaaaatagctccagataaatagaagttgcagatactgcacagctgggagttgggccagatcaactgaagcagtaaggctcaggggtacatgctagcaccaattgcttctcctaagtttggaggactgrcttcagctgagtgaatggaggcatggcattgaatggactctccattaacctttcatgtaataattttgtgtgtgcttrttgctaaattcataaactttcaattttgagagtcaaacatgtttaattagaaatctataggataaaaacctacccccatcttacatatgcaattgataatataatcctgatgatgcctggctccagtttcaatagaagtaraagctcttatttgatttaaaataatcagtgaattaatctaggtatttagaaattaaagtggggaaacaagcccccagtcacagaattcatatccttaggaaaagtcatcatcctatagttggtgtctattactacagagatataaatataggcattggcctcaaatttatactattttgagttgatttgaaagatttgagtggtagtttaggctctggaaatatgtttcccttctgaatttttttctttgaaatttgggtaaaaatgatttttctcctgcataatgatatgaataacactatttactcttaaatgtgttaatctacttactaaatatcaaagaaatgattgaaatgtttcaaggggacatggagctgaaaggtggaatgagagacttccgtttgggctataagccttgtggttttatttgaccttttaaactcagcacttacactactttatttctaaatgttctatgaaggaataagagtttgtagaacaaaagagaagggctaaaagagagaccagttagaaagaggtggagagtcagaactggagtgcaaaagcacaaagattccaggcatacaaggatgataaatcacttccacaaatgagcgcaaagggatattgtgtacaatgcttccatgaagaaagagggcactgataggtacccacctggttgaaatgaacaactactgtattccaagctttgtgttgacagttttaacctttgcatgtcattttccagggagtgagacctttagagctggatgcttaagtctgtaacttaagtttcttccacaaagaggatttattttgctttttgtgacatgatggtgctagaacaaaatgtactaagaaaaatttgatggcagtgatagcattatcttgagggataaagaagtggagtgagaatgctaagtgtagatgaaaaggcctcttcaaaacccatttggatttgtaaagtgcatgcctggagacagcttgagcctctagaaatgagaagaacaatgggagaatggttttattcccatctgaataattgcaagttgaccttcctccaactagaaaagtggggttgtgtctgaggacttggttggagaataatttttccttagttgcttcatgatactgaacaggtcacttagcctttctcctccttactttctttcacagtaaaatgagatggtaatctccacttctaagggttgttgtggagaccacatgaagacattgatgtaactctgcctggcagatgatgtaaagtgcccatttgtgccttttgctttctttgcttttgaggcatttggcacttttattattctttgatcaaaatgagagctttcacatgggaaatcaatttttgggggatttgggtcttcaaactttcatccaaaaataaagactatatattccrtgacatagtatgagtaacaaatgagagaatttgaaatgcagccttaaagggtgttaaaataattttgtttaacatggactgaagatcagcacagagctcaggtttgatggagagcataaaattagacaaattcctggataaaagacttataatctaattagccatcaagatcccataaatatttatgcaaaaatcgtatgactggaaagaatttcaagttaaatgcaaatatgattttgaaaaaagaaagcccttaacttccttgttcactctaacctcttatatgcattcaacatgtcatcgaaatattaaaaaaagaaaaatcttaaatcactttagtgtgacaagttgtctrtagccggatggttgactggatataaaacattataccccttcagctattaaagctgtccttgaaaaagaatatctctcagtttccttcaagatcacttgtgcttyaatgaatagcattaaaccgctttgattttgataatgtcatttcatcagcacagttttttgcccttgacctataagagatacaagtgggaggttcctaaaagtcatttcaacattgtcagctgaatataagtatgattttctgagctgactacaaatggaacaagctgtaagagtattttgttcactgcaggtgttcaaatataggctcaatatatagtagttatcatgttgcctcagttactctaagatgttctggctctaggaaaccaaagatgacgagaagaatatggacacacattaagttgaggaaakaattgggttatggggtatctatctctctacaaacttgcaaataagcacaactgttcactgatgttaagccagagaatatttggaactcattaggttttacttccttgtattttagtgtgtgtctccacatacttgaaaaccacattaacaaactagatttgtacccttgcactaaggcttacttgtctgatttagggcaagttatggacctactctaggcctcagtttccttgtctgtaaaatggggttattaataagagtgcctgccttataagattattatgggggttcattaaggcaatcctggagagtttcactctgcctacctcacaggaagcattcaaaatataatctttttattaaaataaagacaaaagagtgtcttataaggggattttcccataccataggaccatttgtctctcaaaaaaagtattacctttttcaaactgtaaaagttcttttctgaaactctaagcataggttgggtacttggactagattcatgggatatgtttttaccccagacttcattattttaagtatttaattcatagcattcatttagactaaatatttcaatatttttttctctcaaaatactgatagcctggctatcctaggtaagcattgtvtaggataaggagctagcacggtaaagtaggaagccctctgactttagagtgccgtggccatagtttatgttctagctttgacacttgttagccaggtagtcacctgaggcaagttacttaacctctctgagcctcagtatccacaattgttaaaaaaaaaaaaaagataatattatttttaaaggactggaagaaaagcataatgagttatttcatgttatatcatatggtactgggtatccagcaaacaatctttccaaagattgcaattttcacttttcagccagccaggtatgtctgcatgattaaacacagcctgagagtgctttgtccccaccccacaagcagcaggaatatcttctgtcttgcctttgtcctaacacagaattgatgtaagtttctggattgttcccaggctgtgtcagtacaaaggccctaaataaatgctttggttagaaacagttttggctcattcacaaagcagtgacaaaagtgaccaacttccaaaggcaaagcaaatgattctgtgactggctttatttgctyagggaagaatttgtgaattttgtgccaacagcatatgtacacattgctgtagctatctcttcctcctttttagagccattgaggcttcttagcttgatgggctaaactagagagaattcgagtttttgtgttattaagtttgggacattctagcttcaatcttaccattgcttttgatttttgttttctgggtcttgtaaaagctttgrgggtttgacctaccattttgttagcattgacccatcacggagctctacatgctgggtttttatgttcttggttgtccagatgggtttgttctgtgctgtggggaatgcagttaattaaggccttcaggcagaacctacaagtgctttttaggtttttcttgctgattggttcatcattctccttaacttattatccacatttctcctccaatctcaagaatgaacttctcataaagccccaccggctgacatatagcctgcaaagcactgcctgtttgactgccttgtggtttctctgtgaggaaaaataattgtcraaattattcatatttaaatcttaagcttttctgaaaatagatgtgaacaaattaggtgtcctgggaattaacctaagctaagtaattaatgatctttttatctgtgtgaataaggagaatgtttaataagtattgctaatgttctctaaaagcagtcccttcttattgaacagaatagtatcatagtttgttcctatttggtgtctgaacactccacgacaaaaatagagaactgaactacaaatgctgagggtaagaactacaaatgctgagggtaagaactttcattcaacaaatgtttatggaacacttggcatgtgctaaacagtacacacatcaaaaaatttacccctcataatacaaaggagtagacagaaatgcagcaagtttcagggactagcttgcttacttgattccagttgtcatctggcttcaaatccacacctgtcagactaaaactagtgctgaagtctgttgaacaggtgctttttcatctaggtgcaaagttacatacatgtgctcaggtgatggggttggtgctgatttggagaggaaatcttgctcttctggtggcattctagtgacatccggctgaagcacaggttgtttaatgaacccatctagattttactctgtaggtcacaagccagcaagtactaagacaaaaaaaaggacaaatggatgagaacactgtaacaggtgttaacttcatccaaagtttatttatagatagtggcacggtcagttagcagatgtaaatcttttgggggggctaatttatgttaaccattccaggttgggtgacaaaataatatcaaatccctggaataatttttaccaccctgtgaggtgtggagcttcaatgacataggaaagaagagcaggtctcctaaatatcgtcattgaatgtatcttggtaggaatttgtgggtatttgtttgaaattatgaaaaactcaggacatgtatcagggagtcaccatccctgcatgcttattttatgctaaaatgaaccaatgtatcagacagtaaactaaccatcatccagaaagctaatgaccaggtatgtgggttaagccctttacttccttttttttaaattatttttacagagaagaagttgatgtggtgactaagtgttcaaacttggggccagacacttgggtataaattccagctctaatacttatcagctgtgtgaacctgggcactytgcttaaactctctgtaaatgtttctcatctataaaatgcagtttataattggatctatttcatagagttgttatgagttttaaataaatgaatgctatttaaattttgctattttcttttcttttcttttttttttttttctgagacagtgtcttgctctgtcgctcaggctggagtgcagaggcacgatcttggctcattgcaacctctgcctcccaggttcgggtgattcttgtgcttcagcctctagagtagctgggattacgggkgcacaccaccatggacagctaatttttttaatgtatttttagtagagacagggttttgccatgttggctagactggtctcgaactcctggcctcaagtgatctacctgcctcggcctcccaaagtgccaggattacagtcgcaagccactgcacctggccaaaattttgctgttttttttcattcccgtgatccttacattttgatagcattataaattttttccctaaaaattaaaggggaaagatgaagtagaagtaaaactaaaagtgtttgtttttcagggtgtttgtttgtttgtttagtaattttagcacaagaaccaggtgaaccaggttgtttgacttcattcattcattttctttccaacatgaatattatgattgactatgcattaatcagagtcttttgcagatatgagaggggagggggttggaggtgagaggagagggagttggagctaaaggcaaacttttagtcaccccttccacagttctycttggaacaatcgtaaatatctgccatgtgttgttcacttaggtaacatttaaagcaccaggccagatgctgtgagagacataaagcattatgtaagtcagagatccctgttgattataatcaggattgaaagataacacatatgtctataggaagttaaataagaactttggagtctgactgaaagaaaatgagtgcacaaaaagcaaatcagactgggcttaagagggtttaagagatggtgattttctcactctgtcattgacataatgttgcctgtggttaagcacgaaatcaatggctgagatggtaagtgttgcatggcttattggtagatcaaagcatgactgttatgaatgattgactgagttgaatacagtcatctgagaaggcttcatggcaggggtagaaactgaactatgccttgaaggatatgtaggagttggaaaagcaaagagaaaataaaggatgcaaatacttgtaggaactccaatttgtttggggaataaatttacaataggatattatttttgtcatttttcttgcagcatggtatttttaaaagagatatttaaaggcaattctcaataataatctgctccatgctgtgcctgattctgggccagatgaaggttgagaggaaaaattgggattcatggaaaaggacagaagaggaggctgcaggtgatttaacaatagagtaagcagaaagttctttgtcatctgttcatcaccactggagacaaaacagaaaagatgactgttttagtgtgagggatttaaataaataaggaaaagcattttgacatccccatgactctcactttaatcaattattaaatcttatctatttgctattttaataattttgaattcactcwcctgcctgtctgaaatgccaaattcttaagccaccatctccttttgtctagatgatcataggagtcttcggccactttaccatattcattcttctctcactctctgccaaatgaacaatctttaataaaagcaaatcagatcatggmagttttcttccttaaaacctttctataatttactattcttagaattaattccaaactttatagcaagacctacttgttcctgcatcccaggccctgcctcttctccagcatcactgcacgtccacattgcctgggccctttatgtttcaaccatatggccrtggttttttttcacttcaggaacttcctatataggattccctttgacaggaatatatttctcaccctcacttaattcctatacatccaaagatcagtttttcatgggacagtttcctggccccctagcctatgttaaataccgcattataggctctggggagacatcgtttttatcccacttgtaatgacttgtttaatatcatctttccaaaagacacttagtgtacaactgttgaacaaaataggcaagaagttgtgaaacttagtaatacattcagacattaaagaaagacaattagtaattcagacattaaagaaagacaatttgtccaatgataagtgacatcgatgaaagagaagatacagagtaagtatcaggaattttagataaggaaagcagtttgcagtattaaaaagaatggtcagtatgtctctatatcatacaaaaattaactccagaaatattatagtgttaaatgtaaatcttaaaatataaagcaatggcctcagtaaagcctggtgtggactagtaagtcattaataaatgtttgtcaaggagattaatgagcaaaaatttcagatcatactcatttaaaattctaaagttggtttagccccactatgcacacagtgctcccctgactgcgtagcagtgcaggcaaaccatggccaaccccagcattgtctcagttctgctatgaaatctcctgtggtaaaagagaatttctctcacttctttttcctgtctcctgtgagattccaacaaggtctaacagagctaattagttaccctgtcgctagggcatagggacttcctggcagtgatttctgagggtgccagaagatctattgaaaaaaaaaaaaaaacactgttccagagagtagacatgcagatagatttggtatttcaactcctggattgctgtctctgtctttatgtctctcggtgtgtgtgtgtgtgtgtgtgtgtgtgtgtgtgtgtgtgtgtctttctctctctctctcacacacacacacatacacacacacacacacacactttctcttcctgtctccccttctgaaaaacaaacagcttggctcctgggcagcttagctttaaattggaaaatgcagccttgcttggcagaacaacagtatcacagcctccccactgctcagaacagcttgtgacatacatccctgcaggcaagaccataaagggctgtctaatatactggaaccaccacctccaaaaatactttcctgtacagctttttcagaattctagtctctcagggcatttcctttcttctcctgcartttgttactctggaattgatccttggcttctttcctccctgcttaattaatgatcctcatctcttgagtcattagaaaccactgtggccctggagatgagaactagtgcagacatcaaagggcaatggagaggaatcagtgacaggacaggagttctgaaagggcactttggtccctctgactttaataacataacaaatgtcccttttaagccacttcagagaatcccagattcaaacaagagcttctatctacctctcctccctgctcatctcaaaaatacaaaatctagattgaagccagctcttgcatcattcttgtattagtctgttctcacactgctgataaagacatatctgagactgagtaatttataaaggaaagaggtttaattgactcacagttccacatggctggagaggtctcaaaatcaaaggcaaaggaggagcaaagtcttacacagtggcaggtaagagagcttgtgtagggaaattcccctttgtaaaaccataagatctcctgagacttattcactatcataagaayagcatgggaaagacctgcccctatgattcaattacgtcccaccagatccctcctacaacacatgggaattatggaagctacaattcaggatgagatttgggtggggacacagccaaaccatatcaattctaattctgtcctaaaggatagtggcacctaataagtctccctctgccatccctcttgcattctcttagccatagttaataaagggactctaacatccttaacttgcattcaacaacccagtcactatctgcagtgctactttccttggtgtcttttatgtgctggccaaacttgcctaaccctaatttcataccatagataygatatgggatgttctgttccatactttgctcattccattccttatgactagaaatccttctccttcctcctgggcctcttcataactaacctgtcctcacagacctagctcaactatcatccatggaaaaattctacttcctatgaattctcattctctatgttattttttaaaatagattctgcatttccatctgcatatactctctttctaggttgtaagctacctgctgtcaatgactgcttgactcayatttgcatgactcaaagcctaagataaggccttgaacccagaaggtacttaacacattattggatgggtgggtgaatggataaagtggaacctttttctcaatgctcgtcttcaaaataatttagttaaaggcattatgacatgaggaacactaaaggctttctaaaatatggcccattttacaatagacttcaacataatgcaagttcatcttaagccttatgtatattttttattgaaagagtgtaagagaccacaacaaaacaatccttgaccttttatgtagtcagtcctacaacctgaatcataatggcaatgtaataggggtttcattattaattttgttgttgataacttcagttacttttttatatttgaaattttataaccaaagcaagaagagaatacaaatacgtaagtatgcttaagaatcatattcattacttttaagttgagagcaatgacaacatattcttggcctattttctctccagactttaaaccaagtacttttgctggggactttcccaatgtctcatcccttttggggtgtgtgtgtctgtgtgtctgtgtgcttcagttctttctccactgctttaaggtctcagtttaactgagcatccaaaactcattttctttcagcctttgattttattgaaggaaacattaactcactactttctaattaagcaaatctctttgtgcccttctactttttgtggccatttttttctagtggaaaaatagaggtaaacaataagaacaattttaaaaagraattagggcaatgcccttctagtctggggatggtgttttcctacttagcagttctcctcgtggtggaccgtaagataattcaggatactcccttcccattagtttattttgacattatcatgctttctgctttcttctcaactgcttcaggtcacctgctgagttttgtggttggcatcattcttgttcttattgttgtcttaaaaagactagtctctaacagagatggcttacttttttagatgaactcagacttttaaaaaaaaattgctttttgttacatgttatcaaatgttatcaaggtatatatctttttaaaaaataatctaaagtgatttttttcataataatgaagtcccagaggtagaattcaatagaatcatctctcttttcaattttatatttgaaaatgtgttctggtttacatttttatgtctaggacttccaaatactttatttttcactattctttgggtccaaggtagagtgagttctatctagttgcagtaggcagagatgattgacctgagacttagattaagacyatattgttgagttctttcaagacctgctgaggattgacccaagacctaagagtcaatcaggagcttaaaaaaactgatctagggccaatgtagaatcaaatgatggagctgagtagctgagggacgttgtttatattaacaattactgtgtacctactatgtgccaagcactgtatgaagtgctaaggttactgtgctgaccaagacaaacatggtcctggctcatggagcaaagttgacagtccagaaaaataaagatatgaaacaattacacaatacatactatattaatctgttctcacactgctaataaagatataaccaagawgggtaatttgtaaaggaaagaggtttaatggagtcacagttccacatggctggggaggcctcacaatcatggcagaaattaaagaggaagcaagacacatcttacatggcagcaggcaagagagaacttgttcaggggaactcctctttataaaaccatcagatctcatgagaaagaacccccaatgattcaattacctcccactgggtccctcccatgacaygtgagattgtgggagctataattcaagatgagatctgagtggggacacagctaaaccatatcacatactagtaagaagtatgatgaaagtgtgtaatagacttgaagtagtctgagaaggtggcaaaactttcccactgaaaatggcatttaggccagacacagtggcccatgcctgtaatctcagcactttgggaggccaaagtgggaggatcacttgagtccaggggtttaagatcagcctgggcaatgtagtgagactctatctttacaaaaacattttaaaaaggatagctaggcatggtggcatgtgcctgtaatcccagctactggggaggctgaggtaggaggatgacttgaaccaggaaggtcaagagtatggtaagctatgattgcatcactgcactccagcctgggtgacagaacaagatcctgtctcttaaaaaaaagaaaagaaaatggcatttaattgcagatctgaaaaacaggcagacattttcctaggcaaatatagaggggtaagagtgttctaggccaggggtccccaaccccaagacagcaatgactgtcttgcagactttccattcaggcacagaacttaattgtgaaccagacatataagttcaaaggattcataaaggtaaatagggcagctgagtcctggtcacttacttgaggtccaggcagggattcaggattagagggagaatgagktatttgtgatgcaccagatttaagccataggaacaaagctgaaagactagtcttatgaacaaggacaatgtactgtgggagcccygaggaaacctggaattacccctgggtctaaaaagtcacttaagaaaaatgtgggggcccaggtatcctcacagtgttcctgagtctgggtagtttgcaaagatttgactaaatttcagatttccctggattgtaggtcttccattctttgtatctcactgctttagtcggggatagctcaagggctgcattgtggatctagcagaaagaaactggagcgaagagactgtagagaagggcagtgccaatgccaccctcttgttgtgtctgggtcttcacattgtcctttataagctttgcaactctctaaaagtgaacaaagtatttctcttgaaagctcaaagagtgtattcctaaatcccacatcatctattggtgaaatctattttgcactcacctgcaatctcactggatgtgttcctatcccttaatgtctttgttctttaaaaaatagatttttctagctttgagaaattaaatgcaaattaatttaaaaattaaatttgatcttagttgaggatcatgtactgaacagaaatgattcagaatagggaggggtagctcagtatcactgaggaaacgaatgcctatttaacctgtgtcaaagatgagctcccttttgggatcatggcttgctctgagtgttggggaatatgatgaaatgtaactctcacgtctcattcttatcttttaatttttccttttctactccaactgccttacctccaattaagatttggcatcatatagaaatataccactctcccttaattctagccataatctcattttattgtgaaccaacctaattttgaggaacttctagggagtttcaccatgttaaatgttgtggaactcatattagagatgccttcaacttgacctgggccatgggtcgtgctgtcacacatatttgcttccaggaggccccaacaccagggaaaaagcgtaccactcagtagtgcagactggctataacatgttaagatgtcttttgcaaaataaaagatatctcaatgaatattcagtatttggtaacagacacactaaaggggaaaaaaaaaaacaaaatatgctgcaaggagtacttttcagtgtcactttatggtccctggatgagaaatgttttcatgctcaattattattcagtcaaaacctaagtacacctgatatctggtgagttagttaggaggttttctaccttggttggtgggaagagaaagtattcttggccctgtgtaaacccctatgattacttactctaattctcttagacggtttctctctgggccttgggtagtttccacccatgcatgtgctcatcagtactctgctgaagactcaaggtccctctgcaaacccccaagtgctctctctctgcagcactttcctctctggaactctgccttgtgaacttgagatgccatggcctccccacattcccagctctatctacccaactcagggtgatcgctggccacttgcctggattccccttgttgtatcattgcctagatactctccagactataagctagggcaatcatggggctcacctctgcttgttcccatctttcaaggatcattgcactttattgcctcatgtccaatgtcttgaataccattgtctcatttatttttgtctgtatttctcagttgtttcaggcatgaaatcctacttactttatcttggctggaagcaaaatccctccagagctattttaaggttgttaagattgtcttcagtgctcactttttgaggccccaatccctaggataacaaacccataaagaataatctacatctaagagtaaacttttatttcatggcaaagtgaaatgaaaagattttaactattcttttaaaatccttttcctgagtcactaatttaatatacagttatttatagtttctctgcaaaggattatttttatatttayagtagcctacttacaaatcatttttatattaatgaaattgttgtgaagactaagtttaatagttaatgaagctgctagagttttactttttcaggcgtatttttacatatttttcatttggttttgcatatttttgatgcctttaaacaatttcttatgtattttcatgggctcttaaatagctcacaggctctagcaattggccctatagtacctaacggataaaacagccctgctttcttctggagttcagagtgttttagtatcacccrtagactctgggcttgggaagccctttgtttcccccagtacaacaaggccctgaggtaattttcagatttccctctgttaggtattaggcaggaatatggttgtccccttggctaaaactgtgacttttaacccagctaaagaagtttcttcaccagctcaaaaattctcatcctagggactctgctcttaattctcctaaattagtagttctccatcaggggaagtctccatgccttttttctctctccccttgaagaggacatatggcaaagtctgtagaaatttttagttttcacccttgggtggcaaagggagaattgctactattggcattttgaggatagaagccggcaatattactaaacatccagcaatgttcagtagagcccctcacaacaaagatcttgcctgcaagatcaacagtgacagagttgagaaaaaatgttccagcctaggcaacatagtgagaccctgtttccacaaaaactttaaaaattagctggacatggtggcatgtgctgtagttccagctactcaagaggctgaggtgggaggattggttgtaccagggaggtcaatggtgcaagtgagctgtgatggcaccactgcattctagcctgggcaacagagtgagatcctgtcagaaaaagaaaagaaaggaaaaaacactgctcaaaaatcaatgtaggctcaaagtgcagaattcttgggcttacttcgaagggtacaatttttggtgggcttgttgttgcctagctttttagatttttattttagtgaactctattaagtcattctaattttgaacggaatcatcatgacgttttaaaaagattaattcaacttatcctctatacaaagagcaatttgtagcttccttaaaatcaaaagtgctgggctattacaaatgaccatggtctgtgacttgaccactagcaatttaactgacatcaaggctgggcagaaaggcccagtaggtcatggagacccttttgaagggcatttttattctctgcacattctctgactgatcatgtggctctgactttgcacagcttagaaatgaaagaggtttgttcccctcctgctatcaccatgctccatcatcatccattttctgtaccacagacacagatactttgtaatgggtaattatttttatttgtcccgagttacctaggaatgattatatttctcataaacaagaggaaagaaattatgtagaaaattccatgggagcacgtgaggtagcattgaatcttttactgaaattcatattccaatgaagtctgattcataatatatttacctcctagaaatgaagagctttatttgaattaattagcaagaaacatcagtgactgtcaatattgattttttctttgctttaagttcctatctgatgtggaaataaccaattctgtaattcttatccttgaagtattctaattacgagagtttgtgcataatgagcttcaagtacataaacaaattttggtagcatctatagctcttcctagaacttcatacattagacctggcattgtttttagagttttaaaacatgttaggctgattcttatctttggaaacctttgctcctgctgttccttttagctgaaatgcttctctctctcrtgtctgataggggaacaccaacactattttaatcaacttagacaagctatctcctctaacaaacctttacttatgtttattccaactagggctgcattattatttcatgggccctaagcagttttgtggrcacctttcttcatgaaaaaattaaaatttgtattttacaattgaattggcataaaactgaatatattaatattatatattgaaaacatttttgtctacctaaaagttaacttttcttctgattttaaaataaaataaaacatttttgtagactgctaaaaagtgggtcctaggcactgtctactgtgcctaaaagataacacatctctgaccacaagggttagaattgatcattctttggcgccaccattatttcttttgcatataagtgcctatgatacattgttatatttgtttatatatttttcagtctcttcttgatatctgttagcccatagaatacagggtatttgactagcttattgcttctagtcatgcctaatgggatacctggcataatttaagaataagtgaatgaataaattatatggcttgttatggtattttgaaacctttgtcaccaagaaactcaaattcatgagaacacagcaaggctgggctaaatgagaatcttggtggctgccatatgtggtacttcttcaaaaagagttgtgatgacttttgctttgagaagatgaagtaagacatacttttccctattcctttcactaagtacaactagaaagcttggatgctttatataaaagaaaagaagactcaagagagagaaaagccagactggctaaggacttcacaacacaaggaacaacatagtagtgacttctcaggattttcttttgcctcaggtgtctcagacctgatattggagaagctggcaaccacaaatgccaataggagcggacaaataatgacccaaggaaagcctgcttgttctagccaaagggcctggaaaagggtagccggacaagccagacaacttttagataataacctcttgaccctagtcaaacaccacagaaaaaactgaggccccacctccacctactagaaagattgaattaagtgcttagatatccaccctggccaggaggtaaggagggtcccaaaactcttgctgggttcaggacagaggccaagtggggagccaggactttatttcttgatgagcaatgagtatcttcccttccatggtgttaagagagaatatgtggggagccaggattcctactccaacaggcagtaatgaggcactcctacgcgttcctcactgggatggtatcagaggaagcctaatgtgaagttagaaattttacgacaaataacaatgccaccttcttgcagtatctgtggaggccacctaggggcagtaatgaggtacctctgtctccaccagggtggtatcagtggaggcctagtgggagtgctggactccacctctgttaagcaataacaaggggcccctctctacccatgtataataggaggccaagtggagaacctagacttcaccttcacatggcagttacaaagtgacattccgcctcyacccacttgagcagcgtcaggggagttacagtacagcacaagatcaaaagaaaattttgagccttataatatcctaaggttttaataatcacttttcataccaagaatcaaaaagatctcaaactaattatgaaaacacaatcaaaagacaccaatgacaggataacatagatgttaaaatcctgaaaaggatcatagaacagccatcatgcaaatgcttcagtggaaaattacaaatatctttgaaacaaatgaaaaaatagtctcagcaaagaaagtaagttttaattactgtaactttgtaatatattttgaaatcagaaagtatgatgcctccagctttgttcttttgctcaagattgctttggcgatttgggtcctttttccatgggaattttaggattttttttctatttctgtgaaaaatgccacttgaattttgataggaatcacattaaatctgtagatcactttgtatagtctggacattttaccaatactaattattccaatccatgaacatgggatgccttttcttttttggtgtcttcttcaatgtctttcatcaacatgtactgttttcagtgcagatattttacctctttaaatttattcctaagtattgtattctttttcaatgctattgtgaattgactcattttcataatttctttttcagacagttcattgttagtgtatagaaacaaaactgatgtatgttttgtatggtaagagttttactaagggtgtttgttgtttttgtttgttgtggtgaaaggaatgagaatcttccaccatactaggttttactgaatcattcttcaaaatagttgttccaaatagcacttctttcagctgtgtagaagagcatttgctgctccatatggccaacctttgatgctatcagagttttaccttcttccaatttcatggatgtgaaacaaaaaatattattttagtttttataacctattaatgaggttgtaaatattttcatgttagtcatccatatttcttctttaaattgactatacccattttttctattaggttgtataatttatataatttctattaagttgttagtcttttctgataattcccaatattaattttattttgacattgatttgtattttttacatcataaattgctttcaaaaatctggattggtataataatagtaaggtaatcagtatctgaattaaatgatctttgaaattaaagtttaacaaggaaagtctctgagtaaaaatggctaactagtaaaatgtaaatataaaagacatcactaatgtggagggacctgagtggccaaacactgtgaagttatttgtatcccatatgagtgcttaccaatgggtcacctcagcagaggaggattttaatgatcaagtggatagaatgacctatgacctgtggataccactcagcctctttccccagccacccatgtcattgcccaatgggcccatggacaaagtggccatggtggcaaggatagaggttacacgtgggctcagcatcatggacttccactcaccaaggctgacctggctactgccactgctgagtgcccaatttgccagcagcagagaccaacaytgagccctagatatggcatcattccttggggtggcaggttgattatattggacctcttccatcatggaaagagcagaggtttgtcctcactggagtagacacttactccagatatgggtttgcctatccttcacgcaatgcttctggcaagactatcatctgtgaacktatggaatgccttatccaccatcatggtattccacacagcattgcctctgaacaaggcactcattttgtggctaaagaagtgcagcagtgggctcatgctcatggaattcactggtcttaccatgtaccctatcatcctgaagcagctagaatgatagaatggtggaatggcctttggaagtcacaattacaatgccaacttggtgacaatactttgcagggctggggcagagttcgccagaaggccrtgtatgctccgaatcagtgtccaatatacagtactgtttctcccatagccaggattcatgagtccaggaatcaaggaatggaagtggaagtggcaccactcaccatcacccctagtgrtccactagcaaaatttttgcttcctgttcctgcgacattatgttctgctggcctagaggtcttagttccagagggaggaacactgtcaccaggagatacaacaatgattccattaaactgaaagttaagagtgccacctggaaactttgggcttctcctacctttaagtcaatgggctaagaagggagtgacagtattggctgggataatagacctggactgtcaagatgaaatcagtctactactctacaacttaggtaaggaagagtatgcatggaatctattaggagatccattagggcgttgcttagtattaccatgccttgtgattaaggtcaatgggaaactacaacagcctaatccaggcaggactacaaatggcccagacccttcaggaatgaaggtttgggtcacaccatcaggaaaaaaagcacaacctgctgagttgcttgctgaagrcaaagggaatatagaatgggtagtagaagaagttaatcaccaataccagctatgaccacttgaccagctgcaggaatgaggactgtaattgtcctaagtatttcctccttcttttgttaaaaacatgtttgtgcacgtatacacttgtactaagaaaatatcttcattttatttcctttatcatgtgacataagatttattgacttcatatcagcatttaagtattgttaactttatgtatttgggttggggattggtacatttccrgttgtatgaagggtagttgtattacattagacataattatgaccttattactgtctttatttgaagattatgcataatctcagaagatgtgcatgggttcaagttgacaaggggtagacttgtgatggttaatactgagtgtcaacttgattggatkgaaggatgcaaagtattaatcctgagtgtgtctgtgaaggcattgccaaaggatattaacatttgagtcagtgggctggggaaggcaaacccaccttaatctggatgggcaccatctaatcagctgccagagaatataaagcaggcagaaaaacttgaaaaggttagactggcctagcttcccaacctatatatttctcccatgctggatgcttcctgccttcaaacatcagactccaagttcttcagttttggaactcagactggctctcgttgctcctcagcctgcagatggcctattgtgggaccatgtgactgtgtgagttaatacttaataaactctcctttatatatatatatatatatatatatatatatatatatayayayacacacacacacacatacacacacacacagacacacacatatatacacatacacacacatatatatacacatacacacacacatacattccattaattctgattgattatgtccctctrgaaaaccmtgattaatacaattaagaaattaaaagaaatgtccatactacccaaagaggtctatagattcaatgaaatccctaccaaaattccaatgtaatttttcacagaaataaaaacaattctaaaatttgtatggaaccacaaaagatctcaaacagtcaaaggaatagagaaaaaaaagaataaaacggaatgcattacactacctaacttaaaaatctataagctataatgaacgaaaacaacatggtcctggcattaaaaacagacattttgaccaatagaacagtatagacagcccagaaataagcccatatatttgtggtcaattgattttcaacagaggtgccaagaaagcactagtggagaaagaatagtctcttcaataaatggtgttgggaaaactggatctacacaagcagaagaacaaaattggactcttattccacaccataaacaaaaattaactcaaagtggattacgtacttaaacatgagacccgaaactgtaaaactacaagaagaaaacaagagaaatgcttcacaatattggactggacaaagaygattttagatatgaccccaaaagcacaagcacaagcaaaatataaacaaacgggattacaccaaacaaaaaagctctgcacagcaaatgaaacagtagagttaagagacaacctacagatcaggagaaaatattttcaaacatacatctgatgaggggctaatatttaaaatatatgaagaactcaaacaactcaatagcaataaaacaacccaatctaaacatggtcaaagaatctttgtagacacttctcaaaagaggacatacaaatggccaacagatatatattagatatattatatatctaatatatattagatatgtaatatatatctaatatatatatttataaatttatatatattatatgtatatatatattctcatcactgatgatcagggaaatacaaattaaaaccacaatgaggtattacttcatacctgttagaatggctattataaaaaagatgaaagatagtaagtgttgacgatggtgtggagaaaaaaaaatgcttgtgcactgttgaatgggaatgtaaattaatatatccattctggaaaacagtatggaggctcctcagaaaactaagtatataatttatcatattatccagtaatcccacttctgagtgtgtatccaaaggaattgaaatcagtatgccaaaaatatttatgcgttctcatgttcattgcagcattattcacaacagccaagatattaaaactacctaggtgtcaattatcaatgaatggataaagaaattgggtatatgtatgtgtgtgtgtgtgtgtgtgtgtgtatgtgtatgtatatacatgtatgtatgtatatgtatatatatgtatatacacacacacatacatatatacacacaccaaattactatttgggggtgtgtgtgtgtatatatacacacacacaacacacatacatatatacacacacatacctaatacaccagattttcttcattcattaataattgacacctaggtagtatatatatagtgtgcatgtgtgtatatatatatatacacacacatatatatacacacatacttatatacacatatatatagtgtgtatgtgtatatatatatacacacacatacatacataaaccaaattttgtttatccattcattgataattgacacctaggtagtatatatatagtatagtgttactatactatttggtgaacatatatatgtagtattgtaatggaatactatttagccttaaaaagggggaaataacatggatgaacctggagcacatcatgctaagtaaaataagctaggaacagaaagacaaataccgkatgatttcacttacatgtggaatctaaaaaagttgaaatcatagaaatagtgagtagaatgatggttaccagtggctggaagagggggatggatggagaaagggaagatgttgatcaaagggtgtaaagtttcagatagacaggaggcataagctttaatgatctgttgtgcagaatggtgattataatgatatatatttcaaaattcctataaaattagattttaaatgttttggtagtaaaaataagtacctgaggtgatacatttgttaattatgctgatttaatcatttcatattataaaaatcaaagcaccacattatacctcataaatatatataactattatttgtcaattaaagaaaagtgggagacagctaatgggaacagggcttgcttttggggtgaaaaaatattttggaacttggtggttgttgcataatactgtgaaggtactcaatgtcactgaattgtattctttaagatggttaactttgtattgtgtgaatttcacctcaatcaatgaaaaagatggaaaaaataaaattaaaacgtaagcaaaagactggaagaaaatattgaaaatatgtatctgataaagatttgtatatagactgtacaaaaaacctttacaccttgaaaataataagacgaacaacccaaccacaaaaggtatttgaatagacacttcacaaaagaatatataaaaatggctaataagcacatggaaagatgctcaacataattttttattagcaaaatgaaaattaaaaccacaatgagatatcatttcacgcccagtagaatagctataataaaaaagataaacaataaaaatgtcaatgacagtgtggagaaatgggaactctcatacattgctggtgggaatgtaaaatgatatagctactttggaaaacgttttagtagtgctgttaaaaaattaaacataatttaacgtatgacccagcaactctcttaggtgtctaatatccatgagaaatgaaaatataaatccacacaaagaattgcacacagatgttattagcatggttttccataatattgaatacaaccaaatactggatatagccaaaaattcaaaacaatctaaatgtctaccaactggtaaaagtgcaatagccatacaatggaatattattcggcagttaaaaggaaaaaaattactgaatgtgcaacaacatgaatgaatctcaaaaatatgctacgtgaagaaatgcagaaataagaggtcgtgtattatattattctattcatttaaaatatccagaaaaggcaaatctgtagagtcagaaagcagattacctggctttgggatatggtgaaggagttgatggtgggaattaacagtaaatagacatgataattcttttaggggtgattaaaaagttctaaaactatcttatgggaaagttgcacaatttggtaaatttatttaaaatattgaattgtacacttaaaatgagtgaattggtatatataaaatatacctcactgtagttactcccgtctctttgtgtgtgtgtgtgtgtagccatatacatataaaaagcttggttgcattttggaccagaaaaatgaaaatagaggggaattttgtatcctaaagcttgtcttatattctccactttattgttattctttattaattacatggagaagccatctaaaacactaggtgtttgatgcctttgctttttctcgtgcctctgccttcttgaacatgattaatatttaattttcttttcagatatacaacactgtatttggctgatgctaacaggaaagttcatttatatcataaatactragtaaattctaagatatttgggttaagtaagggcaaaattaaaatggttgtccattttaaaatgatggttrtccaatcaattcaatgtgttttctacatatagattcctttcttattgtagaaaataacatcctaaaatataatggtgaaataacacatgtagtatgggtatgattttataacagaaaatatccaattttaattgaaaaaaattaagttgcctaaaacttaaatactgtggttggtatggatttataaagcacataatattaaatttgatcagagaaacttttaattgacaagtgaggagttgatatctcaaaagggaargatatgtattttaaagtttcattctggaaaagggcagaaagaaacttaggaaggatagaaatgaagacattaaaattaatgtctgaccttttaaaaagtacagctggccattcaaatagactggtacttcctatgttacctttcatactgtaatcaaaatctacaagaactgttggtagggatgacagagaaacagaacaaatgaaaaataatgactttaagagcagatatctgaaatgtgtagtattgctttggctagagaataaaaaatgtactggatttttaaaactctggactggaaatttcattaaagcttaaaatctttacttcattgtattaagaagaatcaaaactaactaatctyctaatacaattatattttcagttcaaggcagggaagatgtgttctaataaaatatttaatgacaatctgctattgcccagctactccattcttgtaagctaagtgaatgtcttataagttaaatgaaatgtgttatgcctttactgttttatgtttgggtcacacacagggctgaggggaaccagtgaaacagatcggtgacatattaacctgaagttgttcatggctgtgtattcaagagagcaaggacaaataatggtcaaggaaggaagtcagggattggtggctctgtactaagtgtcagcttcaaagggagagaccagagcataaacagacaattctctaggttgcaaattgggaggattaggaacaagtaagagagwtccatgcaggatggacaagaaaaaaaagttttataccaaaaattgtatttcatggcattagggcagtctactggggtaaggcactatgcagtactaggcaattagaattctattcactagctatgtgcacaagcggctcctgacctggtcattttggctgtaaaactattcatggcaagtatatattatttgctttttattggaatgattattagtctgacttgactgtgttgtagatcactgtattgcttttgcacayagcctgcttatctagaaagctgatatctagtagctgatatttttatgtaagtacctaagggacttctcaatatatggttctwatactatgcaacctatttctatttcagcctggacagtttttgacggtgcagtcttgctatatggtgtgagaaatggctgtaggaaacaacactcaacgaagttattccatcatcccgtgttttatatttgttgaggtatgtgtattttttaacctttatggacaaattgaaataaaagtamcagtttttattctgataacttagattattttataaaattaattttatgattggtaagtcaattttgatagcacaaatattggtaaagattaataaactatgcaaagtgtttcttaaataggaagtcatagagtaagaattttttaaacttcacctttggatatataatatatccaaattaatatatccaagaaatataataaaatgaatattgtgttttattatatttcttctattttcgacaatgatgtgaatgttaactatgaaagagaatgaagcattttaattaatttttttattaaaaaatcaatatcctgtttcaggaagtcaataatccatgcattttacagatgatattagttcatggtcttttgccttggaacccaaataaagaaaaataatcttagagtttactatctcctctggacattttagtagagtattgggagcttgtgcaatgtatgatttcttttgtcctgaattactttgttcagttgctccaactttgtactagcagtttttccagcacctttttggttaaatttcctgaactccttttgtactctacctctgtttctatgtttgctatagaggagacaaagacatgaattttttaggaaattcggaaaaaaactgctttctaggttatctcaaaataagatgttgatttgccagagatgttattgtatctgccttatcaagaaaatagggcgtctagtggatcggtttttttttagcctaaagatcagacctaaaatatgacagtgtaaagagctgaaaagtaagtatcctgaacttctgtctgggtaactgaaggatagtctccacatcccaggggtgagctgtagcatattctttcttacggcatcttttwggctgactgtgggagaaatgtgtgttgatctactttattatccatataaaaacaaagttgggttaaactactactcatattagcaaaaatgtactttcagtacatctgttgtttatacaaatcctgtgaaacacttagacaagaacttttatgttctccaacttgaaataactttacctgcctatatagtcagataattttgagcattctgatttttgatcagatatatgggtgtttggctgatcattgagtttcaccttatagacattgcttggtacttttagatgaacaaatatttcataacttattttctggtgatatttgataatctgttcatattgcagaaccaggtaaagataggagagaaggttggaacagagatgttaatataagcgaagttacatatagactcaatttaagctaaatatctgaatgggtaaacaaagaactcatcattcaacaagaaacacatattcttaatattttgcatttaacttgctatacgatgccaaaataactccattcagacaatagtgataattatacatattgtgggttctggttacgattcttcttattaatattgtggtgaagggaaaaaatcatttttcctgctgcttatgcgaaaaagttagaaggtaaaataacagtacctttttcagtgtttgctttctcttttgttatatgaaaaataattttttaagtaggctgcgggaagttagggaataagtcatccatcatcatctttatcctccctgcagcaattttattttatattttcttaaaaatcaaggaggaagcaaccctcaaagtgagatgtttaatttattgctggaagctgtagtctccgaagattttcagctctctaatgtgtgaatgaagagcttggccggtggagcagcaacaagggagatraattagttcttctgtagcttaccctgacacaaacataaatagaagtctaaaaatctgggagaggaaagatggtttattctttttcttgttgtattgttgttcttattttgcatggaaattctcttagaactgtcttagaaataggcaggcaaaagggaagggaagtaggacacagaagacattgagtgggaaggaggtgaatctcaaagtggctctcatgattctcatgtatttcattcaccaaacacttattgtttacctatattattccaggtactataacaaggatatcacaaaacttggtaaaaaatgtcaacttgaccaatgaatatcttttcactgtttttttaattatgaaagaatttaatcacagaaaataactgacatccctgcacctaccatcaagacaaaatcttaaagttttgtcatatttgcttcaaatatttttgtcaaggaaaataaaatgttacagatatggccaaaatcctattgtcctgaagccagaagtcattatatgtatgaagtttggggcttcttttccctacatgtttcccatgcatggtttatattttcctacatatgtatatattcataaatattttaggaaaattttacataaatgacactatgctgaacctttcttttgcaacttgccttttcattcaacattatgtttctgagatttatccagatkggcagtccattcgttttaattgttgcartttatcctattgtgcaaatatacctactgagggacagtttgtttatgcgtttgtttgcttaatatgctttttcactgtcataaatgtttttgcagaaaatattcttatttttgtctctttgtgcatatatgcaagagctctcttagtttgacacatagcagaattgctaggggataattacatttgccagttgttttctgctgcattatagaagcaaccttgatatttgtatatcaatttctttgaagaaattttaaaaacctctattattaattttatgagtatgtcatatattctgtagttttttttcagacaattacatcatctataagtggcagcagatttatttcttcttttccaattgtcatgttttttacttttttgccttgtcttattgctttggttaagaactcccctgtaacgttggatagaggcagtggtagaaaacatctttgccttgttgccgactttaaagaaaatatttcaagtgttttactattgaattatgaataaacgtggatttttacttttttcttgctccctaccatcatctactttggattacttaatttggtttaatcccctatttccttcctttattggttaaaaattatatttctttttttaaattactttaraattttaaatatacatatttgacaacacaaactgaagttcatcaatagctccatgattctcttaaacaatcaatgaccattctttggctacttcgagctcttatatgtcatccttcatttttatattttccttaaaattttcacctttttttcagttgggcttctttgaatttacctgtattcatcagtttctttgcttactattcctctcctactgtaatttgctcatgaagtttatcctttagcaatcctttcagcaagagtctagtactgttgatgaagagattccaattctgaagagatttattgtgagctaaatatgagtgaccacgccctgtgacacagcctgcaggagaccctcagaacatgtgctcaaagtggtcagggtgaagcttggtttcatacattttagggaaatatgagacatcaatcaaatacatttaagatatacattggtttgatccagaaagtggaacaatctgaaggggagagctttcaggttataggtagatttaaaaattttctgattggcaatttgttgaaagagtcattatcaatagaaaggaatgtccggtttgataagaggttatggagaccaaaattttatcatacagatgaagcctccaggtagcaggctccagagagaatagactgtaaatgtttcttatcacacttaaagtctgtgtagatggtaaaygctggtcaacttttcctgaattccaaaagggaggagggtataatgaggcatgtctgaccctccaactttgtcatgagttggggggttaaatcctccacctcttttggtgctctgaaatttcaatataatatgtctaagtgtgaatttatactagctaggacttattgtgtatcctgaatattaagtcatgtttgtcactaattctgtaaaactctcaaccattgctgcttcaaatatcttttctgcaacatctatgtgtatcttctcattctttcactccatctcttagcccatctcgttgctgctttttaatttccagaaattctgtgtgtttttaaaattatttttatagtgtcattttctgtgcttatggttttagtttgtctttaattatatyaaatgcaattrtgtattttcagattgtcctattatctgaaaatattggcactctgatcctcctgttggttgtgtctgctttctttagctcatggtggactgtttccttatatttgtggtttttgtttagctccagtttagccgagcttacttcttctgtaaggttcatgtagaccttaggtgttgagagtatcactttggaggaattttgcataaatgtttgttgcccttgggtttaatttctatattcagcaaccaaacttgtaaagtctcaaacgtatcgtcaaagttgatctttccttgtagtcttcctataccaacaggtggattatatagaacactttcagtttacctgtgaattgaaagggaaggwgagagggataaccattgtttgtaggtatttgcagtggaatgttttcatgccatttttgtttcatgaatacattcattcattcattccacaaacacttattcagtaactacatttttccccaaggcattatgtcttttgccattttggatactttacatagtaactatccttctgtaacttggatctcactaagttcttcatagagccgggactgttgggccatgcttgaaatgtgtgtgacagatccarggtggtaatgagacatataagctgctcatagtggaatgctgatgtgcattttcttggtgattttaattgtatgagcagagttttgacttggggatgttttgtttatttgtggcagttggtggggagaacagatgccaaccagcctctacaattcaaagttgctgatgactgaggagcctgcctgggactcacccagaaggctgaaatagtggtagagaagctgcctgacaatacagcaggcaacataaaaggtcttatggggaccacaagtcaggagcagcattgcccctggtaatccttgaatttcttatagaccaaaaggaaaagttaagatgccactggagagagaacaaagtttgtagattacragagcacctacagggaaaagctgaaagggagaggattaacagtgggaggaaagcagaatggatcaagaagtatatgtaatggacatggcaggcagttctgaaaaccaaatccttgaatgacagacattcagaaaaatttctcttttgtacatctcccagtctcagctgatcttgaattgtagcttgtagtcctggccagatcccttaaaaataggatagtgattttaaaagccaggatataaacttttctatcacttttcagacagaatcgctaaaatttcaaggtagtccacaatgatatttctggctgacaggtcatagctctttactgctctggttctaccagagcaagctgaaacaatgctgagccagacaaaagctagagaagtcagatggtgcaggaaaaggagaaaattgacaatctttaatgaacatgaggacatctattttctcatcattttttctccttaaactcataacattactttttgttagaataaaggtacttaaacatacctcaaaaattaaaaagagataaaattcaaatagtctgtgattttcattcttagtcctttttcccttccttctgccttcccttcttccttctctcccgttccacttctgttactctttctctcttcctgttttcttcctccttcctttttttcactgtcatttcagcaaaacttctcatgcttgagactttttttgtaaaaaggacttctctgaggaaaaacacattctaattggtgagtgaaacatctgaaaaacaggaatgtaaacttcctgaggtctctcatgccttctcacagctaataccaggcatattttccaaaatgcttaagactgagatgccctgtttgacagatattcccagacatcagtggattcctctcaagaaaattttaccgtgttctctatgaaaccattaataactcagccaagtctcttttatatatatttgtgctaatagcaactctaagtggagcttagttaccatagcagacaatattaagtaccaggaattggacagaatgaatgaagttgttgtttgatgtgtacaggtctgacagttttatcattttgatggttgctcatacttgcaatttttattgcctatttttgacaactcaattttctcagcttgaacctagcaggtgattgttataaattgcagactgcagataaataatatgaagttcagcaagaacttgatgatttcgagtgtctttctctggggccagaacttaaagaattccatatcatcacttttggacattgaataccatttcaatgtttcccttattttgtgtgtctcaggttttgaaaaacgaatktctcttggccttgcttttggccctttacttgcaggtgcccaaattcagcagtgctgactgccctgttcctgagacttagattgcaactcttacatttttacatttaagtaacattgaaagctttttctctaaagaagcaaaagaggctttttaaaaactctgctagatcttattaaagtatcataattttatccttatatagaatgagtgagaagagaaaacaatttgatgtcaaaagcacagagtttgagtcctggctctgccatttattgctagtataaacttggggaatttctttggaccccaattgcttcatctgtgaaatggaaataaaaatgacttccttatgggaacttcaaggggggaaaaaaaacgtggctgtacctgaatgtgcttgccaagaggtaggtggttataaatgttaacatgaaaataatgaaaaacaacagcttctacccaatataaaacaacaaatttgaaaagaaaaccaatgaaacacacacacacatacacacatacacatacaaccttgatagtaagagagggactctgcatagtttaatccctagaaatgtgacattgctgggcttgaatatttktataatatatattaaggtggttactgaataaggcttcaaacaaagtaataaaaatttttgagagtattttaaattgcaatgacaaatataaagtacttctgcatgcattttcttacttaaacatcatttgactagtgtttgcaatatcagaatgaggacaataccaatattcaagtatctatttttcatggtattgaaatatcagtgctaagttctawaatgagctatggtttccagcaccctttatccttgtctttagatgctcttccaattgagtgagggttcctctgttcttcagaattgaggctctacaagtagagtattttgagatatagtccactcttaaattgtcacaaagaagagaagagaatgtaggactaagaaaatgggtctggcactggaggacaaggaatcaggagagaaggaaatactgctctcacagaaatcagggggttagactccragggaaggactgggagttgagcatggaaatatccyaccccctgtctttctgtaattcccctactatccccttttcctatattccttaatggttcatccttctctccccatcctgccctttcagagataataaagacccaatctgactctgggrgtggggcgggaaatacaaatctcataagtataagatatacagcctcactagtaatctataaaatggtaatgataactgtaacataccatggaaacattttgaatgagaagggataaggtcagaatgaaagtgcctttgctcttgtcaacattttgatgaactagataaatctgcacatatcttaagatatattattcaggtttcagattttttatgtccccaaaattggtgttatatcattaaatacaccatatttgacatttgtatggtattttagtataaaactggagtactgaaaaaatcaataggataatattgaccctatgcaatagaaattcatcttcactttttaaatttcaaatgaaaaggtatagaggagctaattgatttacttaaggctacattgccaatagatgttacacttgagatttaaatgtaacataaatgcaactcttatattccttccactacaaatatgtaggcataattattggtctcagagtcacattcaggaagtcaactttctccactggataacaaagatagagtaaggaagtcctttctgatatgttcagacatacagaaatgttgaaatatgagacttctacaatctgccctcctttaagagcttaaagaatatttttacattttaatccaggtaaatctcaactatctggaactctggatacaggctcattttgtttgatggaggtttagctgataatcagaaaactcctttgacgtctataactgttaagtaacattcttttaaaaacgtattttgagtgatttcaagcatattctatataataaaacataatttaataattgctcaagtacttacaacccagctatataaaatcttaacattttgacattatttagttcagatttaaaataaaataataaaagcataactgatatagttgaagctcccatgaacccttccatacagggtcttgtcttcctctttgcctctccagtgatcatcaccaaactgaatttgatgcatgtagttttctaagatttgaacaattttctaaaatgtgtttactttgtgccttaaaaagttcaaaatgctgaccgggcgtggtggctcacacctgtaatcctcgcactttgggaggccgaggtgggcagatcacctgaggtcaagagtttgagatcagcctgaccaacatggagaaaccccgtttctactaaaaatacaaaaaattagccaggcatggtggtgcacgcctgtaatctcagctacttgggaggctgaggcagtagaatcgcttgaacccgggaggcggaggttgcggtgagccgagatagagcgccgttgcactccagcctgggcaacaagagtgaaactccatctcaaaaaaaaaaaaaaaagttaaaacgctgagtgcaattacatgtagttttttaaataaggtattgaccacaggttgtgattgtaggctatcatagttgcagatgttaggaaattggaccaaatacatatattgacccaggctaaatattctaaattggcattttaaaatagtctctgctaaaactgaccttaataattagtatgcgatagttttgccataataacagactatgcctaaatctcagtggcttaacatatcacaggctgatttctgacactgccagtcccatgtgtgttggtttgagagcttgctcatcacaatcactcagggacccatcctgttggtatctgcatctcaacaagcttttacggtcactctggtaaagggaaacaaacaaacatggtgattcacaacacaggcttttatagcttcatatttaattgatataggtcagttccactcacatttcgttagccaaagcaatggaaatgtggccatgccccacttcaaagagagtagggaattgcattccacaaatatattgaagggaacgagattctttatagcctaaatgattaccacagttccctcatggtttaatgtcttcctactgaaaagtaagtcccaaatcatccagataataaaaggttttacttagacatattctatttcataaaggcatttgcatgtgcttgctgggttttttattcattaaataatttatatagtaagtggtgctgatagcattccctgtcactaaagagttcaagcagagaccagtttgccaagtggtaggaggctgaagagaagattctagtactacgtgagtgactggactaggagaccattaacatttccttatgactctgaatacctgtcattccaaagatgacagtcctagtgacaaccatatatactgaagtatctggcatctcccagcttctaccccagctttcctcaatctgccacctgctttgtgttgttttccagaccaccttgttcctatgctgtataccatgtggtaacatcacgtgttccctgtgaatttccctgagaattagcattacagtactttaaaccaagcattcttcataacgttgaatgaatataccaatactttaatcttcatagaattttacattcttgccttccctcatggagcataagcccaggcaaccattccaagataatggcagactctgaagtgaacatactatatttgtaagaactataaaagatagcatcttgtctaatgcagtgtattattttgcacaggtagctggtaaattcattctttgctttgtgatgcatttttctgtcactgaattaatccctctttgaatataatatcaaccagtctagaccatcattgatatgtgtggctggccaaggtattagaatttctcttgaatcttaattccaaaattacatgaagcataatttctaagctaatgcagtgctataataatttaagacaactgccattccaatctatcttggagcctataaaaacagactttataggaagtctgcttttaagaggatgaaatataaaatggcagtctgttgagagagtagcttggcaatgtttagcaaaattttcaagactttgtattctttttagaccccaaaagaacactcctaataatctatcttacagaaataatcatgaatatgacagattttactgcaagataatttatcacaaaattgttaataattatgaaaaataaaattcctgatactaaactacagagtattggttttaaaattcttgtccctttatatagtggaccactatgcattgattaaagaattatattgttggccggacgcggcggctcacgcctgtaatcccagcactttgggaggccgaggcgggcggatcacgaggtcaggagattgagaccatcctggctaacayggtgaaaccacgtctctactaaaaatataaaaacaaaattagctgggcgtggtggcgggtgcctgtagtcccagctacttgggaggctgaggcgggagaatggcgtgaacccgggaggcagagcttgcagtgagccgagatcgggccactgcactccagcctgggcaacagagcaagactctgtctcaaaaaaaaaaaaaaattgttaaagatttagcctygtgaggaaatattcaaattagatagttatgtgaatgcgggagggaatggcttcaaagcagtatgtaatctgagtttccccaggcttcgccagtacatgaatctagatgacagtcatggtatcagtaagaattaaaacaccagcatctattgctcagacctgttcacagaggattccaacagctctacacaattgccaggttgagcctgagattttcatctgtgttcatgaagcagtctcttgccttgttacccagagaactagccacctttttctttgtcaattttggtcacgcgtatctgtttcctcaagcaaagaaaccatgtaaagttgcctcaccctgccattgctagcgttactcacaggaagtatgctaatattgacccactagtattatactttctccacacagagccgggaagaagccctgctcccaaacttgatgtctcactgtcacctgaacatcagtggggtgctgtgtcttaagggcaaatatttaaggcagacttccatgtctttcctactatcattttttcttctactttctctatgcagattaattcataaaaatggcttttgtgaaccatcagactcactaacttctcagatatgccaggtgtgttggtcatggcaatagatattgcaggctccaagccagataacctctccagtccaaccgggcaagacagatgtaaaatgtgatgcctttttggaactatgtgcctatcaagtgtatgcctataaagaaaaggtatgcaccaaaatcagtgtctgtttctgggtgttgggattaaaaacacattttctgcrttgaacttgtattactttttatcagaagaaataaaataactatgtttaaagactgcattaaattattgatgtgtgtagtatgaaatacagaattctttatacaaagttacagactggttatgtcttctgcaatttgaaaactatttatattcacaaaagatccaaagacatatcatttctcaaagcacaatagaaataatgagagttgctctttctaatacccaattgtttttacaagacattctatgtggttttcaccagtgccaagccttagggagtatgactataaataattatactcacatttcacttgtcagtcttgtttaggaaaataaataatayttgagtactctgaatttcttttattttagattaataaattgttcattatgtaaaatagttttccttatcttcagtcttagtactatattttctacatatacttgtgtatgtagctctggccagcatacccactgatactcagtctttgtggtgcatgtacatcagtaaacaatctgtgccctactcccatccccatgaacctaccaccactaaaaacatccctccccacagttaatgataaaagcatagactcttagagctacatggggccttagatcacttatgcaaatccctcgtttcagataacrtaacaggttcatagaggttaagtaacttgtctaagatcatacaactgattattaacggagtcacaaccaaacctgcaggtcttgattctgtcytaatcaatgacaaatttcatactcaaaaatttcaaaaacataactataaaacttatttcagaatgtttatagcaagaatgatttcataatgggcagtgtggtgtatcttcacatacataacatgatgagaggtggagccttcaagattaggagagcctagggtctgcaaagatcctacaggagcttccagtcacctgtctgaaggggtcaggaaagccaaccagaggaatttacatgtagaccaatacctgaagacggtgaggtggtattcaagtgaaggcataggctcatgggagaagggcttcagaaggaaaggatagtgtggcatggaccaagacctataaaggtactgagaatttgaagagctaaaagagtttcaaggctggagcttagaggatgagacagggagtagtgacagaggagactggcaaggtaggcagaggccaaatcatgcagtaacttgcaggccagattatgcagtgtatttatcgtaagggctttgggaaacaagagcattcttgaatattttgagtttagaccttacctggtgatatgagatcacagaagtggtgctgagaacctggagccatggaaaggagacatgagctgagattttcactatatacaatagataccatattccttcagactgcagaatatctttctcacaggggaacaagtgtcatggccccagtgctctcactgcccactttccgtaatacatagtagacagataaaaatgtgaaaggaactcagttattgaaaaacttctgaatataagggactgcattctgaacgactatgtcaccctttcttataactcaggaaacttaaaaacacaatctcaatggttggcctaactttgatactttgcaaagctgctttagtttatctgctagtccctgtggcaggggcttgaaaatattttcccaagatttctaaccagcatatgtaagtacaataactttattctctgtcctaatgtcaactcttctgtcctattttccccataaatttactccttcagcagaccatgtgttagaaaaatgcggtcactctagcataagggtatctgatactttttctcctgatgcatgatctgttggatataaaagtgatttgtttccccatataaatgatttttcagaattggactggcaaagtgttaactcatccatatactcattatattttctttaggagcaacagcttatatttgaggactgagacacagaaaaataaggtacatctatgcctgagatagagatctttatctctgaggtactagttagcctgtatggagattcattaatagcctttggtttcactagcacacttttttcatactgcagcacacagaccacctgctttggagtgattggagttcttgttaaaattctgaacccaaccactgattttaatcagaatgggacgaaactagagatttgcattttataagttttcaggtcattccagtaaagcttgagaactaaatgaataaagaacctcactgtgggaaggtacaccagtagagtgtgggagatgctcattttctcatgatctatccccaggggccttgcaaacagttctggaacagataggattctctgtcctctgcctgaggctgttctccagctgtaggaacatgctagggcaacaaatagactataattgacggggcattggcaggctcaggagcagtcctcaactaaagaaggaggggtgatggtagataaataatccagcttcctcattcctcagtgggacaattcacaggagtttgatatagtctctgagagggtaccagcaaaatagaatgccagttgcccatagtgataacacactcattaatggacctcattggcttccctccctttcccatccyatcccatccctttgggaagtgatcccatccaacatgtttcctgggatcacttcacaaataaastgcttacacccacatcattgtttcaaagttcactttatgggaaacccagtaaggcagagaatacatacagagtggaaaaactttattctaacaaaactaggtgatacgatttgaaggatagagggctaaaacaatttttaaagagatttgaattaaatctgagagctatgtgatccagggtacttattacctaattaaaactaagtcagtgtagacaatttcattttgtttatttttcatgttgtatgccattatttctgtgtaggtccccatccttctgtgaaatttaatgggttccacatcctacccaaccaacgcattttaatcatttgatattaaaccctgcaacttttccttgagaacatcttcagattttctggggataaatgtttggtatacattgcatagaatgtagataacttaaaaattcattaattttcttttgatagtagataaaataatcacagaaaaaaagtaaagactcattttccctggaactacatgttattagacccaatttcccaatctgtttgtgctgctataagaaaatatatgagcctgagtaaatcataaaaaacagaaaagtatttttcatggttctggaggctggaaagtccaagaacaaggtgccagcaaagtatttttcacggttctggggactgggaattccamggtcaagcttgtctggtaagggctgcatcctctggaggggacaaacaccatgtcctcacatgacaggacaaaaggccaagacagctgaatgctgtatgaagcctctttcataaggacctaaattctatttatgagagaggagccctcatagtctaatcaccttttaaagatcccatctctcaatactaccactttggccattaagtttcaacacctgaactttggaggagacatattgaaaccattagcacctaataattgcaactctrtactgttaaaatataagttcctcttagctgatatttcctcagactcttctttggcatctcctaagatgaaacactttgaagctaaaatatagtatgctttattttcagctctggagtaagacagcatggtattttagggaaagtttggatttgagggtctgacaaaatatctgtgtgaccttcagcaggttactgaccatctcggactttcagttttctaaactataaaaaggtaataatgataatacctgctttactagcctgttttcagagttaaatagagtttttaaggtgcctagaacctggcaggctacattctcagtaatcattagcttacaagacaatccagctagagcaaatatgaaaaagctagccttgtatcagttcacgggtattcttcaggtttcttatcacatagttttattcaacttgctctattatgtcatttattcarcaactcatcttgggttaagagttatttataggattctgtgtggtgaacgtctgtgacctgcaaacatgtgattgactttggcatgattcctagctcaagtgaaagctcaaagggctggcttctcaacctaatgacatacacagaatttattcagtttgtttgcttcccacagaaattagcatactttgacataactgaatgaaaagaaaaaacagatagttttgactctcttcaaacacaagatgcaaaatagggaattaatcaggtccaamcagtttggaggtttatgtgaccactcttgccactaaaaaacaagaagttgcatgaaatttttccctttggatcggtcatgcaaatttgcattgtataagcaatcacaaattctgtgacacatgcttccaaggaaaattaagaccttggttggttgtttaatgtgcataatgtgactgcttagcgtatttgagaatgtcatgctatagagaatttcatggtaagttcttattggcaaattctgttcactgtgggaatcctttatttgtgaaaatatttttatcacatacatcccttatcctccmaaaatattttgtcttctcttgtcttacctatgtggttgcatatttagaagtctagttatccctccctggcctcaaccttttgagggctggggtaatatcatttccatcttcatatccctcaaggcttgctattgaacagttatgtgcacaaagcatatgcttgtcttagactggattcctccagaagccaaccgtaaaatgaggatttgaatgcaagtagtttatctgggtggtaatyccagaaagtactatagagagcacagaaatggaaaagaaatgaagctgatacagggtgcattaaagagcacctctcattgtggagaaatggggctctgtgcatgctagggatttctagaaggctgccagaatatgcctcagcattctcccagctgaggggcaagaaagctggaatatctgtcatatggtagctacattgttgtttgaggtttattcccagaggcattgaattttgggtactttggccagccttgcatatagtcagtgtacttctgaatctcagaaaaccctcaggcacagattcgctcttgtaagaaaatggtgagtaccaagggactagggcagggcactagctgcctctgcagtaatgctcaataaactcctattgcacagaattgaatggaagttgctgagagctataagaaatatcaaataatcccaagacctcaaatcatcgattttttacaaacctcttgcagatacatgttttaaacagtatcaactctgtcattactaaatgatttgggggcagtgccacctctaaatgcagtgaggcagtttttcttcagacacagtattctttcacattattggtatgtcttctataaccaggctatgttacagatggagcaagatggagcaataaaagtattagattggtgcaaaagtaattgctgtttttgccattacttttaaagcataacttttatgctctttaaaccaagctatataggatttaagcagagaccttagggggggaaaaagactttatggtcctttggaaacagtgctgggccaggaatcagggaatttggattttcatcttcattcttgtgtaaacttgtagccatatggccttgaagaaatcactttgaagcttctagacttcattttgctcatctgtaaaatgtacatattgaacacttaaggtttcttccagattcaagcataatgatcctatgaaataaggcaatgggacttataaaatttatgtggatctrgtagaaattgggaggaaaaaaatggacatctgtgcaaacacatatatctatgtgtgatgtgtatatatatgtctatatacacattagatacattatatatctatatacacattatatagatatgttatatatctatcwatatatrtagacagatatataacttcagaagttatttttactctaaaattaaaagacaaattttatggcattcagaatgtgatttgcaaattttttttctcttttttcctgaaagcaaatattctctaccacttggaaatgagaatgtgttttccatgtaggatcagaatagggaaaggaatttgagaaagagttatrtctttgtttttcttattactggcctgattaagtggtctgtaaagataaatatcagtggaaactttgtgtggatgtactaagattgcttcccctgtaacgcaagtttctcttcatttcccattagtcttcagaattataccagtataaaaggattccctatcttttagtgttgcagtttactgagttaacctaagcttggtctcataacccaatataaatgcaagattttttgttatttgttttcaagaggtagagtggtgtgaaaggggtagwagcaaccagctcaagcccattggagatttgtagggctcacctgccccaacctctatttcctagaggactttatgtcacactatgaataagggaaatcaggagtttcaagataagcatgaaaatcatattgtactggagatggcaaagaaaaggcaattcacattctagaccagcactaaacccaatcatctctggctttgaccttcccacctggatcctctccacctgaatgcctaggctttgctgatgtttaggtgaagatgctgagtatgattagctctgattttaagttccagccagccatattgatgagcattctgcagctgctgtttccgtatattgagaaagcaaagccacggttgggctcttctgttagggcttggctactgtgtgcacttccctggagaccaaccccactccaaactgggtcttgagggctctgggagtactgaatggatttctaagcttctctagtatctctaaggtgttggtattttcttactgggctactatgaatgagatcccaaaagacctgccagtcaaattcaactttcaactttttaagaactgagaacatttaggtatatgagatgctcaccccagtccagtctagtctaccacaaattaaagtgagtaagactcaattttactagggtccctgaaagaagtttaggttctatctttggagagaaggtttgtgtatatggtgtggacggggagggggagggaaatggggaggagaaatgtggtaaccaactcattctatagttgcatgtggattttatttttgtaccctttaaggtactcatgtctcaaagttttaagtccctattagaagaaagaatggagtcattactgctcacaaaatccttatgtatctattagggggcttcataagatcaatgcatgcttttatttcttttggcaggtatcttactctaccctgaaggcattagagcagtggttttaaaacttcagtatgcatgagaatcactaggagagttaaaaaatgtagattcctgattctcctctcaaagaccagattcaggaaaagcggttgattagaaatttaaattttaaataattgccccacctgatgctaaatgctgttggcaggtggatcttattttttgagaaaaactattttagagaagctcatatgatgtttttgaaaaatctcttcacctagaaggggccttgtcaatgccagaaattggatgtttctaagaagacataaatcatgaataagtaatgcattgctatctacaggaaaataaatagtaggtatgagatgttcatctgaaagtcgttgttatttggggacatcatatgtatttaaacattttgttttgtatgttcacctttttttgatgttcataaagtttacattgacaaatttcctttaggtatggcaaatataaccacttaagagctctgtcatgtcatagactagcctgcaaccttaaaactgttcaatcagattttatgtaacaaacatttattaaatacctacttattgaaacttttctttatgctgggccgtatgccaggcactgaagtgatatcatatttgaactctcctgtaaatggtctatgagtgtcctgtacttacaggcttgtgtaaaatagcacaggttcagacaaacatgagttttactaaagcaaagaggtgctgcttacttagttttagtcagcttagttatcataatctttcctataactgggaagaaggatatgatctatatctcctcagagagactgtcaactgatggtgggaagagggtaagacagtcatgagggtggggagagtgtgcccacaaattataccatcacagtgccccaaagattctggcaaatgggagaattgttaaagtcttagtgaatacagaatttaggggaactagctcatttctcaaaaatgatgggattgaaaaagattttaaaactattgacctgtaatgatttcgggaggcatttttaaacttaggactttgtaaatacaacaattatctgtgaatgtttgaatccatactcatactcaggacaggaagatattcaggaccaagtcttgtgacatacacaakacacatgtgatttccaggttcatactctcaacctgatggttaactttctggaagttctcctttgagtacagattatgctgtaggactatatctgaaaatgcatagtaaaatgcctgctgttttgatctattaaccctagactccatttgttctactctgcagcctgagctttctcccagagtctgagctctctgcttgctgtttaggtgccttttctgttctgtgcttttgagttgtgggcacattgcccaaccctctcttgatccacagcaagggggcagaggtggggatggaggacaggattggtttaaacttggctcacttaccagcagagtctcttcttgaaaagggttggacatgaaaaattgattcagctcccaactacaacacctaggtaggttttcctgttcatctgttgaatgtctacccatatgtgagctaattatattttccctgtaactactatccatacctgaaagtactcattcctccagractcagagctgcttcaaggaccaagctgcaccagggccaaagagatttcaagcaccaccaggaccttgacatcctttctaatggcatagagtggaccaccagagaaacccctccattgccaagccaggacttatagggaatataacccctggcactgaaatccttcaaaaagggacatcacctacccctttccaccctaggtttggaatataaacatgcaataagtactaagatatttttcctctgtgatttgcattatcctattttccagattgtaccttttataatttataattatcttaatttttatttgcctacttttttattgtgtgtatatatctttcacagactataaactccatatctgacaaatgcaaaatactgaataaatattggctcagggaatgagtagataaacctttaaaaaaaatctaaatattcaaactttttctttcccctcactaattcctcttaaaaaaggaaggaaaatgagacaggaaaggaactagaagcattagaccagattacctgcagtattattattgccctctacactttagttgtacctaaattggaagaacgaagcaaagctgtcttcaaaccctttattccttagttcagtttttttcaaagcccgaatggggattggcagtcttcatgctcygaacaattgggtattcttttttcttagagcccagrtgcatttttttgaaagtcgttccaggggcctgagatgaagtgggggtgtgagaagtaagttggctagggcagatagaacctaagtgtcttctccttaagtcagctccccttaygaggctgtatgatactgggccacccccattcaccgtggaaaacaaacccatcactaatggactgtattttggcatatgaagtagtcaaagacaattcytgatagaaccattatctacctgtgtggtccttcaagaattagaggaagaagaattctgtgcctctgagagattttgaaaaaaraaagagtgcttctggggggactagaggacagaatatatatccagaaggagattataagagaactaggtaaacaggaccacagaaggacttccaagagcytaaggaaaggtctcaaatgaaaagctagaggtcctattctacctacaaacgtatttcatttgggtcacacagtgcttatcaggaaatccaaattctgatgcctcctgcaaagttgaaagatctggtaacactgggatcacatcccatagagcaacaatatcytaaagctggggtgcagctcccccttaaaagggagcatatattttttggttagccaagtctcactactacctgttaccttatattctcccaattttactcatttatattggttccagtaggctgtgagatttcaattttcatctatggaatagatttaggatttttaaggggacagtgtagaagtgaatgcatagtcactgtttgcctgactccactggatagaagcaaaggctctgagaaggtgtggttgtcacacagtgattaaaagtcctctggagacacacatggagaatgtctcttgaacctgagcatttgtcagtgatggaaaatttcctggtgaatttttcactccttggtgatagttttctttgttaacatccttggctttgcattttcgtcaatttgtgctgatgtctctgtaaacactcttacctcttttggacattacagctattctttaatctttatacttcaaccttcatttgttccaagtggctaagtagctctctactggaaaatttgcttagtctcagcaaatgtgcctgttattagttcagattagttttgccaaatcactgaatataatatccttggggtagaataaattaatacatttgtaaaggtaattccactaagttttctttttcacagcagtcagaaaaaggaaatagaacatttataatggagcctttggagtggttttctaaaagacccacaaaaattctaattcattgtaatttggtacctttcacatttacagagacagatcatactggccacttccacatcctttagtgcttcccacctttggccaggctaagagaaaagaaggatctaacttgggcatgccatttagtctgtctgtgccttggtttcctcattcacttactgtcatttattgagcacatgtggagtgtattgggcaagaaaggaggcctaccctcagctcagaaactaataaactgaaagaattcattttaaaaaattgtttttctgaaagtggggtcccagaccagtagcatcatcattacctgggaactttttagaaaagcaaattctcaacacccacttcaaatgtaatgaatcagaaagtctgtggggtagggcccagtaattcgtgttttaacaagccctccaggtgattgtaacaagcataaatatttgagaatgtgtgtgttctgtgttccatttacagaaactatgtgagtttctccacaaagctttctctgaaatgaaatgaataaactaagcatgaggtctgtggattcaaagaggtggactttttcctctgtgaatttttcccgtctggcagatatgtgtgggtaactcagcgtagctgtgttatagacaggaccaaccttaattgtggaatgaatgaaacacctttgctccttatctatcactccctttagggtcgtttcttggatttcttggccccttcagtccatcagcacctccacagcccaacaatctgtgcttcttccctttataaagccccctttttattgtttattcattagaaagataggatctaccaatcacatgagggactgatgtttgttttaaaccatgaagatgaatagggtaaaacctgcaacatagtttgagtaattgacactgcagttttcttgctagccaaactatttgatttccacatcaaatcaatgtcaaggaatctgactattccgggtttgttcatttttcagctactgaggtagtcactctaacgaattactgcaaatgtggataattttttagcgagaagttttaaaaatagcacatcagctatgttctgggtcacagcctcgctgatctaatcatttgctctgtcttcaagattgacattgattcctgcagacagtttgattgtgcagtgactgttaacccaggtataagcccaggaataatgttgtcttagatgtgaaaaatgagccatacttcctggaagtatatggattactttcataaccttgtaagtttccttcagatgtaggattatttttagaattataaaaccaaatgttacatacatttttttatgtcctgataattgctttaagttgtggtcatcaaccatgctttgctaacactacaaatagtggctagtgctgcagtacaatatacagtggcattttgtcatagcaaaagtacttctggcttagtgaggtatgaattgcatataccttgaagaaattaatgtagcccctgctatttcyttagagtactgcagagatcatctggtataagacaggagtatgagaagataataacaccagaaacttaggaatccttaatccaggggctcaggggttccctgggctctgtggggctttgtatgggaagtaagcagtggttaaacaacagactgggaagacaagtctgtgcctcgccattcccacccactctcttgagtcttctgcagggggtacttgacttttttttctttctctcattctttatgacagactataagaggattcatagtctccaatcaatttttcttcaaaatttggccttgcgtcatatgaatatgatggatttgacacatttatgttgatcaattttgttgataaaaatggagaggcatttaaaatctagaatttagaagaagaatgcaatctactgctttatctttaccatggaagtgggtatccttccatttttaattgtaattgaacttaatattatattcatcctattattataattacagttttgttttgttttgttttgtttttgagacggagtctcgctctgtcgcccaggctggagtgcagtggcgcgatctcagctcactgcaagctccgcctcctgggttcacaccattctcctgcctcagcatcccgagtagctgggactacaggcgcctgccaccacgcctggctaattttttgtatttttagtagaaacggggtttcaccatgttagccaggatggtctcgatctcctgacctcacgatccacctgcctcgacctcccaaagtgctgggattacaggcgtaagccaccgcccccggcctataattatggttttattgcccctggttaagttcagaattaagatgttgatgctgaaattaatgttcagaaaagataggggatttcacaaggggtcacctactcagtcagaaataagattcattaagatggtaagaaaaaaaggcagcccctgccacccaggagctgtcctagtactatcaaccgggccttggtgttctcagatgaacacaaaacatttcatacacaccatcatcaaacaaggctattctatgaccatgatggatcaagacaaaaacaagactactctgaattcacatctgaaaacagagaaaacattgtccaaatcaaaaaatatgaaacattwacctgtcttatctaatgagtgactgagatatctaagaccacacagtcccatggtgtgcatcatcccttgctgcaacaagcaaaccaaacttggttcaactctaggggtttcctggtggtctttggccagaaaatattctataaatgagctaattactcagttgtgtccattctgggaaacaaatctgaattctactagttaggcccacctccttaacactaggcctggcatgttcttaaagcaactctgtccctctctgtgacttcagttcttctgggagatttattattaatgggctcatatgatgaaaagattttagtcttttggacagaaggagtaactttcttcttagaatccaaactaaaaatggatctttcatttataaatgataatagctaacagctaatactatatatcaggcaccgagctaagtattttacataaattgttttaatccttgtaacaagcctatgaaatggatattattaccacctccactttacatacaaggaaacaaatacagagaggtgaattaaattggccaagattatacagctaatggtaaagttagggctcaaattcaagttgttctaacactacatcctttgctttttttgctgtgagattttttttttcttagacacctaggttgcttccaaatcttggctattgtttgtttgtttgtttctgagatggagtctcgctctgtcacccaggctggagtacagtggtgtgatctcggctcactgtaacctctgcttcctgggttcaagtgattctcctgcctcagcctccctagtagctgggattacagacatgtgccaccatgcctggccaatttttgtatttttagtagagatggggtttcaccatgttggccaggctgttctcaaactcctgacctccagtgatctgcctgcctcagactcccaaagtgctgggattacagtcatgggccaccactcccggccacatcttttgctcttcactcacattccgttgcttttgagatgccttctcttccctaaaatctgatagtagtaaatcaaaatgccagctatatacagagtaacatacatgattccagaagatcataataataattgtcaaaatatttgcatattttatcttatggtaaatgtaatttccaacatcattcttcttagtacaataatgagtccagtgatcaaactcttgagagaaaaatgcactgttgtcagtatataactataggtttcagattatataaacaggtattgtcagatgtatattctctgagttatcaaggatcattgtgtaactatataggaagttgtcttctttgaatatggtagacatatctatattgaaaggaatgagagatatctgtaacgtgaggattgagtacaagtgtatgatgatgttgtcagttgtaacacgtttcctgtgtaattctcttcctcactggtaatagcttgttgagtatttttatctagaagtgccactcagtttgccctagagtattttatttcttttatgccagtcattctcattcttcactgttctctgcctgttgtagtcataaatagtttacataaattaacttgttttagtccttgtaacaagcctatgaagtgaatgctattattgccttcactttacagatgaggacactgcaatatagagaggtgaattaaattgcccaagatgattatagctaatggtgaaactagggttcaaattcatggtggttttattcctatctaatagtctactcgatcattcctttaatgcaaacttaccattcttctacagtttatcagaatttttataatagtttagccatttttatacctcttcaaacctttaaacatttgatccatgttagttactaaatcaagagcttatttgaatatccaaaaatgcataacatagtttaagtaagcaaccagaaagagataaaatccttaaaaatactttttaaaagcactatattaaattcaaaataaggaatctgtttaaatttcatattatgtggaaattctaaggttattaaaatagtaaaagtgcagaagcatataaaatttgtaaatacattacctttctgtcatttttcaatgtcaactttataaattaaaaggtatggtttaaacatggttactgtgtgctttcatgtccattatctggagcaatcatgggaaaacctatgaccacctgagtctttaggatatatcttagcattttgtttataggatactctttatcaattcctactttataccatttggtttgcaattcatttttatgatccttccattcctccatattgccaatcagattctaaagctgatgtttggtacttaacaaggaaaatacactgtgaaaaaaacagagggaaacttagtttaatcataagcccctcaaatgcaaatgtatcattgtcttaatgtaattcacataaggttaaatactgaaagaaataaaggttataattgaattaaataatttctttcatcagtattgtatcccttaatgcaaacttctaygactccttatattcatagaaagaaccaggaacatgggtcagtttacagagaagtgtttggctacagttctgatctctgaagagaatgtgcaattcagtcactcttgactgctctgtaaggcctccagaaaaatctgtataaagagatggatgaggtgacaagacagatgctggtaataaaaaagggagcttagggattgctatcactgaaggactgaaggactraggattaggtcagaaatatttttgttcaagtccattcaagaatcaatcacattctgcaggaatgctggggaaaattacaatttgacctgctacagaggtaccttatatccttgaatagctccttatacttcaataagcttaagtacatcatggcactgccaacatattctaactagctagcacatacccagcactttgtcatgtcacattaatttttagaggtttattatatatgtgataggtgtgtagatatatacacatgcacacacacacatatacacacacgtgaatgtactgtgtaataaaatcaaaacgccagtagtaagtattttaagacaaaaatctggagcttaaattttcattcagaaagtcattaaaagttgttatttttaacttaaatgataaatattctaaagaacattttgctcaattgagaaataattcacacctttaattctatcagcattattcattaaattggtttggaagtccaaccctatgctctcaaaactaaacaaaaataaacattggaaagaatcaacaaactatattactttatagcttgaaaagctaaaggaggggtcaggtgcggtgcatcatgcctgtaatcccagcacttggggaggccgaggcaggcagatcacttgaggtcaggagttcaagaccagcctggccaacatggtgaaatcttgtctctactaaaaatacaaaacttagccaggcatggtggcaggcacttgtaatcccagctactcaggaggctgaggcaggagaatcacctgaacctgggaggcagacgttgtagtcagctgagatcacgccactgcactccagcctgggtgacagagtaagactccatgaaattaaaaaaaaaaaaaaagaaagaaaagaaaaaagctaaagggaccagataaactctcctgaaattttatgtttgtaatagtaaagttatttgaaatgttaaaagaaaaactttagtcaaactaaatttagcagagtttatctgaacaaagaaacagtgatttatgaattgtccagtgctcagaaccaggagaggttcagaaagctttacctagcaacgtaggcaggcagcaacattgtgctacctgatactagstctttttttatttttttttggagacagagttttgctgtgtctcccaggctggagtgcagtggcaccatctcggctcactgcaacctccgcctcccgggttcaagggattctcctgcctcagcctcctgagtagctgagatcacagggcgtgcgccaccatgcccagccaaattttttatttttagtagagtcggggtttcaccatgttggtcaggctggtctctaactcctgacctcgtgatccccctgcctaagtgcagggattacaggtgtgagccaccgcgcccagctggcctcattcattctatctaactgtacttatgtactcatttaatcatcctcactttatcttctcctccctgcttcccttcccagcctctggtaaccatcattgtactctctatctccattagctcatttttcatttttttttacctctcacgtatgagtgagaacatgtgatatttgtctttctgtgcctggctkatttcacttcacataatgtcctccagttccatgcatgttgttgaaaatcacaggattttattttttttattgctaaataatataccattgtgtatatatgccacatttcctttatccattcatctgctgatggacacctaggttgcttccaaatcttggctattgtgaatagtgctgcaatgaacataggagtgtagctatctctttgatatactgatttctttcctttttgatatatatcagcagtgggattacgggatcatatgatagttccaattttagtttttttgaggaacctccatactgttttctgtagtggttgtactaatttacattcccaccaacagtgtatgaaggtttttcattttctctacatccttgccagtatttgttactgtctgtcttcatgtccttgccaacattcattttgcctattttttgggtaaaagccactttaactggtatgagatgatatcttattggagttttaatttgcatttctttgatgattattgatgctgaacacttttaaaatgtaaccgttggccatttgtatgtcttcttttgagaaatgtcaactctgatcttttgcccattttgattggatttttttgtttgtttgttttcctcttgagttgtttgaattcttagatagactggttatttgtactttgtcagatgggtagtttgtaaatattttctcccgttctgaatgttgtctcttcattttgctgattgattcctttgctactcagaagctttttagattaatgtgatcccatttgacagagctgttttaaaattcatttacaaaatgaattttacaaaagcaaataaattttttgaaaagaaacagaaattaggaagagaatctgcccttaatggcacttaaggtacttacatcagtaaataaaatacaaagctgaagtaggatttgtcaacatcagcaccattgatatttggggccagataattttttattgtggatgctgtcctgtgcattgtaacatgttcagtagcatcagtggcctctactctactcatcaaatgcctgtagcaccttctccttcagttgtgatgaccaaaaatgtgctcttggtagaaaatttacccctggttgagaaccactgagctaaagaacaaaaaatagaatcagaaattaatgaaatatgttgaaaagctcaaaaattgaccagttatatataagaaattcatgtatggtaaggtaggcattactaagcaatgaataaggaaaatatttacaattggagttgtgattctcaattttaaagtagattagcgtataacccatgtttaatactatacattaaaattaatgctgtgaatagaattaaatatatgaagtaatatcattaaaaataaccagaagagaatagattcaactgtctgatctttgaggtagtaattattgaaagaaattatctgaagattctatcacattaaaaaaaatcactgccctgcttaaaaaaaaatcagtgttttgacatgaatgtcataattaaaaagggaaatcatagaaaaagaagacatttgaacctattataacagatttaggattaaacatatataccaagggttagcaaacttttttggtaaagggccaaattataaatgttttaggccttgtgggcagggacagtttcatggacttgttacctgcacttggttgaaacttctgctgtcactgtcttaacattcccattaattgtttaacaaggggctccacattctcaatttttactggaccctgtaaattatatagtcacttctacctgtgggccatacaatctctgttgaaactattcaactctgtggttgtagtatgcaaaagcagccatacataatacataaatgaatgagtgtggaagtattccaataaaactataaaaacaggcaatagaccaggtttggcccatgagccatagtttgttgattctttgtctatatgatatagaatgtttatagaaattgaaaataaccatatattaatgaattgtccaacctcaataattcttaaacaattgcctattaacagaaaatgactactgaaataatacaaacttaaaataatgataaatttctatattaatagaatcatgataaacctagtatctcaagaaatgctcactccaagcataattttggaaaacatttgaagaacacatttgaagaattatttaaaaagacacttaccctttgactcagtaacttcactcctaggaatttatctcaaaaaataaatcaaaattagaaaatgctatatacatgactagattcttttaaaagatgaaaaaccaaaaaccacataaatatcatataacacaagtatgctcaattcaagtacgatctatcaattttatggaagaatacactattcttgatagtatatcaagaatatgctatcaatgtggatcaaaaatgatccacattgggaatatgagatagcatcttggaaagtgttttcagtattctgttaagtggaaagaataagcaataaagtctgtcgatgctgtatttgcaataatataaaaactattgtatgcataatgataaatattggaagaaaccacagaggaaagaatcagaatacagtctttgagttccaactctgacatcagtctagttctgggtgggacatgtggccactccttgtttgacagagcaccacttgacatgaccctgagcaaggtacttgacctatgactcagtttatttttctacaaaatagatgtagataacactatactccctatctcataaggatgtgacacttaaatgaaaaatatatagggcatagtgcagtgctttgcccatagtaagctttcaaatggtagctattattgttattattactatttttattagcaaagcatgggaaattaaaagtttatttcatttttagttcagctgttaacatgttatttgtgcagttaaagaaacttctaacagctgtcttttaaaatgtaatgattaagactacagcaatcttggcaggtagcaaactaaaaccattaaaacacggataataaaaagactattataaagatttcaccaacagaaatgggaaaagaattactggaatgctttcaaataagttgctaaggaaagtcacagagacaattaaaatgagcacagggaaaaaggtaatgagcggtgataattaaagctgccaccagatacatatacacatgcacactcacacacatctatatgtcctttagggaaattgactgagtcagcagaggaacagaggaaaggatagtttttaaaccggccatgtcatgaacacgctcctccatccggcttctcccctactgtgaaaggggaagagaagtcacacagcatcagcattaatgctacggaagctttctgttaaagcttgtccttgcctttgtcctcacctctcactgtaggtggatggggctcccagacaccatgtagatagatggtccgtggaggttcgcagttgggttactttaagcaattctgccccaagtgtaggaggtgggtacataacactgaattcactccagctacctggtacgtgagaaaagaagcattkaatgctgaaatctggaagtattctgcaacttcatgataattatccttgttacaaagggccagattatgatttataggaccatctcaccttgttgctctctatctaggaatatctgttagactgaactaggcagtgttctatttcctcgccatgccagaatttgcaaattctctcagcacagagatgtatgtgtataatgtttgagtataaaacaatatattacctacaggaagtcagtagatcgttaatgatattaagatgttctacttgtggtatcaaattctcaacattttgactgtgctgctcctcataatacctaaagatgcagggaacatgctgttctgagattatgtcttgctccatacccacctggacagtatttatcctcttgttgctatcctgcgatcagttctaattgggtaatcaagctcacactttctagagctccctaatctatgcattacctcagctgggctcttagaaccttcatttactctgaaattcacaggtagaatgctcatagccttggcagagagccagggaatccctttgttttgtcccttggtgttaccgtcttatgtacttgctcatcgtgccagtgtccttttttcatttccccatagtattctggcagaaataatggaagcctcaactggagcacttcactgacatcagtagatgtgttctctagatctgggtttctttggcattagtgatgtttggggctggataattccttgttatgggaggttgcattgtgcatcataggatgtagagcagtatccttggcccctacccactaaatgccttgagttgtaacaacccaaaatgtctccagactttgccaaatgtccactgaggggcaaaattgcttcaattgagaaccactcttctagatgatacttctatatgaacttctaaccacttttatgttaaaaatgtcatttaattgagcacggtggtttacatatattaactcattatttatcacttcaactataaaaggatgttattaaatcctttctttcagatgaggaaattgaggccctgccaagtgttacacagttaataagcagcaatatcaggaaaactgttttcaaactgactgctttacctaatcttatagtccagatggatacaggcttaagataaggcttgatccagcagtacaaagacattaaatatggactttatcctctcacactcctcccacctaatttaatttcttagctccctttctttatcctcatgtttcaccccttggcctagcagctctagactttcctcttgtggtagtagttcatgtcatacagcttcatattaccccatccaaaaagaaggcacactttcatggtagctccacagaaatttaactgtttttcctcttaagctccagaaaaatatttyactggttctcattgagtcatatgcccatctctgaaccaacggttgcagctagaaggttgaacatgttgttggctttagccaatcaaggctctaccctggagcaaggcatagggttaatccccatcaaacgatatagccaaaagtaaggagaactggtttttcaaagtatgttagaacgataatcccagaagatgaagaaatggatgctgggttgaggacaaataacatgcttctacaccaattttgttaacaatgttaacatgactcctacagttgatagtttttgttaacactacccctctccctgttctatttttgcaactttaccataggcctgttttctttttcttttttcataaggtattgcagtacaggcrgtattaggttacataagtaagttctttagtggtgatttgtgagatcctggtgtacccatcacctgagcagtatacgctgcactgtatttgttgtcttttatccctcacccctctcccactcttccccccaagtctccaaaatccattgtatcattcttatcaaaggcctgttttctttgcttgacattgctggaaactccttgagataagtgtccagggacagcccattagtcagtaaagaacagtatggtggacccagatccgtgggtcctaccctgctctttggagaggcttccccagctggctcctatggaatggctggaacctctggctcacagggactccctgaagggcagagccagactgaccccctgcaagtagtacagcacttcattcttcaaggggaaaagaaaggaacttaccttttttgagcacttactgcatgccacaccagtcacatacaccatattatttctttctacaaccaccctgaggtaggtattgccaccgtgctttaaaaacgaggaaatggaagctcagaggtgaagtaactgccccaaatcataccacctgcaggaagcagtacacaggtttgaaatgatggctgtttcactctgaagtgtgtgctttttgtctccaaaagtgaatatcttagaagaatatatatttacagagaatatacatttgctaagaatttgttacttatcaagaaatatgctcaacactacttgaataagacagaactcaaagccttttctctttttctgaggattaaatgaatggaagaaggaaagaaaataggaaaaagaaattccttgtataatgagaggatccttagctgttctagtagtaaagagaccatgtagaaaatcagcatcaacatataacaacaacagcatctatagcaatggtgaagcaagttcttcacyaggagagcaatgcatgacttctttaggtagtgacaccaagtcctcagagaaatatagcagcagctggggcagccctgcagcaacttgggaattgaagtagcacctgagaaactggggaagccagcagtatgtatgacagtcccatcataaggcaactcagctctcccctcaggttggtgtgtcctaggggaattcctgttagatgatgtgccaatacacamcagcatgctttttgctaaaaggcagattctgcagtctaccatttttccatcatatgtctcagagaatatgggcaattgtatgtgatgtggcttgttctacagatagtctagagcaggagtcctcaaattgggttctgcagagggctagccttctgagagagagccttaaagatggtatgaggtgggaccaggaggmaacctgtgtgttttttcttcactgcttctcctagggtacctccacttcagcatgtttctaatatttgagttctatgtaagattgtgtctgtgaaggacattttacactaacaaagatttaaaagccatagtctcagaaggaagtacatatctgcctctgaaatgtctaagttatctgagaatgacaggtcttaaaacagtatggaagtcaacagctgtgaaggacaccagctgttggtggcaagtctctcctgagtttgcatgggaacagtagtttgttggtgtacaatagtgtcggtcacgacattctaaaaatagaatttgtgtgagaccattcatcataaagcaaacccccgcccccgccatgatagtagatcctttattaattcacccacagacaacaggacctataatgatacattctaagtaaagcaccaggactttaagtgttttggttgtctatcycaactagtgacagtgaaagaggctacagactacttctctcccaacctaccatctaagagtatgaagaaacgcatttaagaaatggagtggggcctggtgcagtggctcacacaggtaatccctgtgctgtgggagactgaggtgggaagattgtttgaagccagaagtttgagactaacctgggcaacaaagtgagacccatctctacaaaaaaaaaaaaaaaaarraaaaaaagaaaaatttttagctgggcaccatgggatgagcctgtagtgccagctatttgggaggctgaagtgggacaattgcatgtgcccaggagtttgagcttgcagtgagctatgatggtaccactgaactccagyctgggtgacagactgagaccctgtttccaaaaaaaaaaaaccttaattggggaaatcgtgctatattttgagataacttgagttcccctgggaagtgatgaaatggcaaatgtagtgtaaaatcaaacatccagtcactttagttgtatcaatttaaagaaaatgatgtatgaatattgatatggttaggctttgtgtccccacccaaatctcatcttgaattgtaatccccataagccccaygtgtcaagggagagaccaggtggaggtaattgaattatgggggcagtttcccccatgctgttctcatggtagtgagtgactctcaaaagatctgatggttttataagcatctggcatttcccctgcttgtactcattctctcccctaccaacctgtgaagaggtgccttctgccatgattttaagtttcctgaggcctccccaaccatgcagaactgagtcaattaaacctcttttctttataaattacccagtctgaagtatttcttcgtagctgcatgagaacaaaccaatacaaatatatatatatgaagtacatatatacattatatgtgtgtataaccaaaccagtacttcattattgtagaaaacaaatagtttttagtttctttttaaaatgtgtcaacattatgtaataatatgaaacctctgcccgagttcttctcctgtttcaattaatgatgtattataacatatggcttgatatctggtgctaaatctcccccatattatagagatggaataacaagccctcaagcctccctaggggagctattgtgaggaataartaagaatattccactgtgccatagtctctggcaattggcaatgtaagaagctgaagaaaatagaaaacttctgcaaaaatggacattctctacaaatttgggtgaaggtctttgcttttgttgatgattacacactaacaatgatttaaagtgctctgccagaaaataggggggatgccaggrtcatatccaaaagatatgatccactattcaattttgaacattcattttagttcatggtggggaacaattaaaagcttccattttgatgactttgaatttgtttcccttcttttcactgaactcaaagttaatgatgctctcggctgctgtcattgagtctttcacagagtgttttattccttccttataaagtgggcatcgtggtgacggtttcacttcggaaagaaaacacactatgagctctgagtgccctgaggcctagggttggggtttatagacacaatggaggagatctgagggtgcaaaaaagctgtgcagcaggtcttcaaataacattgcttcattacaatgttgataaggaaaaaaagttgattactggtcagtgccacagtctggctgaagtttgcatgctttctccatgtctgtgggttttctctgggtactctaccttccttgcacatcccaaagctacgcacattaggtgaagtggtgtgcttatgtggtcccagmctgagagagtgrgtgtggtgtgagtgtccctcccatgggatggcgtcctgtccagggctggttcctccagttgctgggatgaataatatcaaccctcaacccttagtatataattagctttttattaatctttcttaaatgtatgtatagttcacatttattgcaatgcttaatattaaaagcattttgatatctgtctttggaacttcggtgatacttttatagccagaaatgtgccataggaacttaactccagtttatattaattagcctatggtaaaattggctttgttgtacgtcattttgctgaaagtcacagtttccaagatctgaggacttaccatgttagcatgtttgttaattcatgcatgttaccatgaatttgtgtttgtgcaggaatctgtcatttggactcatttaaggaatgaattttgccagcaattcctccttaagtgagtaggatcattaagtcaatttctttagaatacatgacatctttaatgtttcttatggcccatttgtggagtgaaatattgccactgctcacactgtggcttccctaaaatagcaggcaccgcagatggatttaacgagagccatgcctcacctctctgtgcagggctgactggctcattccaattcyacatagctcacccaaagcaagagctggtccactgccatacaaggatttacccataaactcctgtttcccagaatttcttaacccaattgcaaaaacttcctgtgcagctgaacacgaagcgggagcatgcagtgaaaataactccaaatgaacaaagaaagaaggacccaaagcagtcagaatgagttggttttgaaatgtcacacacccatgcttacacattgtgttcactcttggaggcttcatacactcagttagcattatccccccgccccccaccccaccaccacccccaccccctatgtaaccaagaaatataatttaaatgtgtcagatactagagacagcgatctggtggatcattaagatgctttgtaaaaatgatagatcctttcctattttaccaaaccagttgtcaatattgaggcttggaggatgtttaggatcaacccatcaatatcccttattttgcatctggagaaactgaggcccagagagattaaagtcatttttcgtagatcgtacagtaagtaagtgagaaaactgaggtctgacctcatgtctcctgactcccaatttaatgttctttctacagaaccaaagagcccatggcttattttcatcacttttcaatctaatttcctgagcttaccctcctgacatgatggtttagctgcttgcactatgaacaagtgtcatggtagcttttcccaaaggtgattttcctgggaatccctttgcttattacaaggaggcagaaaaagattttgagatattaatttgtgcacacacatgtatgtgtgttgattcccctcccccctcctcactcatcccattccatttcaataccaagcaagtagccagggcttgagtgtgccttagtcattacagagatatatgccagggaaaacagctgaagctactgaaagtcactgattgttcttgttgtcataggctgtttgtgctgctataacaaaccaccatacactgggtggctcataaacaaaagaagtgtgtttctcatagttctggaagctgggaagtccaagatcaaggcattgatagattcagtgtctggtgagggccctcttcctagttcatagatgactgtcttctccttgtgttcttatgtggcagaaaggagtgagagagcttgctgggtctcttttataaagaaactaatcccatttatgagggcttcaacctcaagacctaatcacctcccaaagatcccatctcttaataccatcccttggaggctgggatttcaacatataaatttgacacagctcttgtgttttatcaaagcttatatttttttaagttgttatactggtatacctgaaggggcaggaagagaagaggcatgtccttgagggccagaagggagaaggaaggagcatattcctcaaaactagaaaagaggaacaaaatgattaggtctttctattaatggagacatatgtcctgttgggtggcagatcttctgtgaggtagcggaacctsaaaggtgatgaccacatgggggcaccaaaagaggctgaaccttggaccctgcaactccaagccccagcaaaggtgcctgtgccctaattgtgacacagaagcagcagagccatgggaacttgaagggactttgtgggctgcacacaaagggctgcagagctaaccagtatagatcagcaccttgagggcctctttgatgcactaggatcccgtaggggagccccaataatcaygactgggaatacatttcctgtggcccaatgtgatggtggcttcaatgccatacatacattcactttaaaaaataaaaaaatgtaaaagtgttcctttttctctgcaactttgccagcatctgttgtttctggactttttaataatcgccattctgactgacatgagatagtatctcattgtggttttgatttgcatttctaatgatgagtgatgttgaacgttttttcataggttggttgttggctgcatgaatgtcttcttttgaaaagtgtctgttcatgccttttgcccactttttaatggggtttttttcttgtaaatccatttaagttcctagtagattctggacattagattaatagattgcaaaaagtttctcccattctgtatgttgcctgtctttaacattttccttcaaaagagtttccaagtgaattgtaggccagcagctcaggctatacataatttcattttgaggttaaacaacccccaaatctgttcatttttcatttgacataatgaaaacaggagaacccacagttattcagaagatgtgaagtttctagtttttcaattttgttcctgtgttttttgttttttgtgatggagtctcactcttttgcccaggctggagtgcagtggtgtgatctcagctcactgcaacctccacctcctgggttcaagcgattctcctgtctcagcctcccaaagtagctgggattacaggcatgtgccatcacacccggctaattatttacatttttagcagagatggggtttcaccatattggccaggctggtctagaactcctggcttcaggagatccacccaccttggcctcccaaagtgctgggattacagacacaaaccactgctttcagccggctttccttttaactcagatcaatctgacaaattcaagatgactgcctaggatgtttgagatactttgttattgctgtcaggagcacacacacatgcacacactccatcaagaagtttagggagagcaggtgagaaaaataatgttgcaaactcccctcacccacatgcccacggcaggtgtctccttccaggcctaatataagctccctccactgaccaaagctgtggttcaaatgctcctcgtacacagtagggatgcagtggaacaaacactggattttaaaagcaaagcgtgaggtccacatcctttatttggatcctagtttctttaattccttcacctgttaatggatgtgatacctgcctcaccaactagagggttggtcagaatatatcacacttaaaagcgcggtgtaaaaaatttttaaagacattgtcaaagaataagtatataaaacagacaagaaggaattaagtatagagggtaaaatgtaaagaagtagaaaaggtaaataacttaataaatttaaacaaaagaaaaaaactggacagaggttgatagtaaattccagtggaactattggggatgtgacgtattagggaaatgagattatttaaaagcagaaccaattgagtacaccataaacgctagacaggaaagggggagtcataatctaaaayagttaaatagtgaattttgtgcagaagttgaaggcaactggacaaagtagcagccgaatttttgggagagtagattgactagagaagaccaataggaagttaatagaaactcgcaggagaaaaatacaaaataagtgagttgaatggataagacaaggaaagattcccccctcccacccaccctcaagtcactgtcttatttgcctaggagttaatataaagtgtttcatgggttggagcccccaaggagattcatctgaccattcctatgacctgccttgttcaaattggtcagttctaaactcagaataaaaaagttgttaggtctgcttctggaagtttgtcttgcttgttatcagatcaagggtttgatgttggatcagagccacaatgatacattaattcacaagtgtaattgtatattgaaatggcaaagtgtatctgcagtcattcagtaaaaagaaaaacagtgcagtgtggtattcaaggattagctgtgtttatcattttgcatcttattaaatttgcaacattcccaagatctcagaaacagaaacaaaagctagttctcatgtgtaccctgtagccaattttggggccctgattacctattccatgagaatatacaaactttgagaaattcacactttatttttttccatttataaaaccaatacatataaaatgcaaaaaagaaaaactcatcaaatgtttaatcattcataggaatccatttctaataatttgatgtatttccttctaatattttctaggcatattttatttcatgatttcatgctgtatttcacagataaatttttttaaatttatctttataataaaaaagggcatttaaaatactcttttaaaataaggtgtccaattctaaaatgctgtgtgcatttgaaaactttcatctttgagtttctacaacaagatctttaataggaagtaaaattcagcagcaaaactgaccataaatttacagaacccatttgaagggtcagagccagcaaagtcagcagattctaaagcctctccaatttctgtgccttgccaagtgactgaagtggagaggcaatttgactattgccttctgactttaattaatgtttaatactcagtggcaaacgtgcacttcctcttgtaagttctcattaagttctttttgaatcagttaacactctgtttataaagatgtgggtattttctcttaattactgtaattttgactactgctgtaaaaatcagttctccatgtcacactgtcagagatcattacagatgtatacaggcttctcccctccctctcctggaaccaatccagtcatctctggaaattaaatgcattaaaaggtttaataaagaaaaggaaaatccagacatatcatatctcatttcaaaccattccagaataaaaccaggatgtattcatcaggatgctgagatgtattgtttaaacattaaggatatcgatgcagagttctattaattacaataaattattgtaaatccaattcattccactgaacaaggatgaattgagatgactgatgctcacagaagcacatttttgattgttgatatttcctttcatatggaaagacacccgtaagggcataaaccctggcctctgtccacaccttcagttgttcttcccctgggatgcaataaagtacacgattgccaagtttgcaagaaaaactaggtatgcatagctcagcatcttcctttctccttccccttgggagccagctaccacaggaaatatgtgttctagtctgttccttctgtgtggaaaaggactgtggttttctagcactatctatgactgagtaggcacatctacctgattttgtggttcagtattaggaggtccacctaagtctctaacccaggctttagaagtaatgagggactattttgatctctctcacacctctctcaactgattcaaaacccatcgtgggctaaagtgggtgctattttatcaacaccaccaaaacacaaaggctagtttcaaaataaaaaagaattaaaacatcagacttttagacattattaaagtttttttttttttgaactagtcattctctgctctgaatttgcaggtttttaaaatttatttattttttttccagtgaattctgytgtactctctgccttgtagtgtttaattctggatctattgaataaaaaggaaggaatctagctgtctggccagaattttctttggcaggaggttgttattcctcatgcattgatatttgtcctctgtcatattaggaattactttccctattaataaygacttgatgaggttaagtgaattgtccaagcttacacagccatttagcagcagaagaggggtttgaactgtccagctccaaggccrgagtttttcttcaggaaaactttcactgtatcccttcctacaacccctacaccatgcccaktcctttcactgtcatgactattgcgggaagggaaaaaagaaacagaaaatggtgccccaattaaaaaaaaaacaaaaaaacttgtaagagagcagtgggaaccatctgtggcctgaagtctcctggctataaatgagatcgtttgttttttttttttttagttttggtttctttctacccccaagcaggttaagccatatacatcaagcagagatttagcacaaattctcctattgcaagagtttaattttctcaggtacttttgaaaatggaggaagattccacattgttttttaaaatgtcttatgtgattatcctattgattggggctaaccaaggctcttttcaattgcaaaacaaatctgatgacctttttctttcgaatttgtttaatggctttgaaaatgttactacaaaagtcaaaatgtcttgagtttactacccagggaattctcacccttgacaaagattcatttgtgtcaccacaataataaaacccatatattagagaaacatcaaagtatactttattttattttagtgaactttgctcattgttgattcacttgctttaaagtagtcgattttccttcctgttgctgtatgcagcatcagagagaaaaccaagtttatgctaatccatattgacacaaatattctgaatttctctcattatcttccttacatatttttactttttctatcttatacttcaaactccctattcttgatcatcaaattatgtggcctggttaaatgtaattttcaaagcattacactttcaaaggtaaattttaaaatcacatacaaacacacatttcagcacttttatgcttgcagaagcatattgccgtggaaaaaggcctaagtgcagccacaagtgaatgaacaaaatatttgagtacagttagtgacaggaagttgaactgatttgtgggaggccaatttttctggtgccgttttatttttttaatgtcttcgaaagtaaacaactgattatccaaaagcattctttgcaggtctttgagcctcactgagaaattctggaatatatctcatctgctctcctggttctgcaaaaactggttcaagtagaccagtggccttggagtgtctgttctcactgtggtgctagtgtcactgggacaactgggcaactgggcatcatgacataaaaaggctacatgttaytgctcctaaattgttctgtttggggagcttttttcaggttaagtagataattgtatcctcttcctcctcttttttttttttcttaaaaagagaaaaaaaataatgaagaaattggggttaaagagtaacaagcaatttgtccaaggtcataggtctaatgagtagcagagcctggaccttctgattacaaatctgctttttgtactgctcagcactgattcacatatcacaatagccttgggcctataatcacatccctagttgcctgcctgctgagctacatctgtgttttcatggagagattagaattataccagcatttcaaccccatcactaccttgccctagctatgaggtcttgggcaagttattttttctctgtgaacctcagtttcctcaatcagtaaaatgggtataaaggcactcaacattacgaggggcttttaaagaaaatgtccggttgttcataggtacctaaagacttccctttatcttattaactttcttttggcttatctgactccagctaaaataaatatgtgtctgatcctacactgaacaactttcttacctgatccaatcaccgaaacttccccattcaggtcagcatctgagcacttcagattccaaacctgtgttggaatatacgtctcatacataggactaatctttccaaatagacttgagttagctttcaaaggacatttagattaagcccagaatctttttctgaactgaaatgtaactgctactcaacatatatttcatttaccaacagatggctgcatttaattctgtttactaccataacaagcttctctaaacatagacatgccaaactggaggtaggtgtgtgattttagggccattcttcatttacttctgaaagtgtaatgattaaaaaattattttgtaactggggaaaatggaataatgtttacaaaaagagaaagtttgaatcacaatcttaaaatgaaagtgagctcatcagaagggttgatggtggtagagatggtaccctgtgccttgggccctaccagaatgacccaacggggatgggagttgtcatggctttaatgtttgtccccttcaaaattcatagtgaaatttaattgccattgtaacagtattaagacgtaggacttttgagatgattaggccatgaaggctccaccttcatgggtgggattggtgcattatataaagacaaacttggccctctcttgctattgctctttctctcaccttctgacatgtaatgttttagcaagaaggtccttaccagatcccagctccttgatattggacttctcaccctccaggactgtccattataagtctcaggtattgtgatacagctgcacaaaattatctaagacagaagtggagaccagaatctcaggacctcagttattcagaaagtggccagaacaactttgcattggagggtatgaggaagacaaaattaccctttaaacatggtttgaaaataatttttgggctttgccaccatgtaattccaaagtcagctaaggctacttgaccctttaatatcattataatactgactcagttctccattctgtacttgcagaggttcagagtactacccaagatttctgtgaattcttggggtagggagaaggtggtgagaggcaaggaatgagagaaggatttacatttacatggtctcctctaggttcatggtcctgattctgcatattcagcttagtttgtgtgacttctctgtcattcaagttcttatccttttycacgtgtcatcaacatggagccaaggtgttgttttctcccccctactgtttgtaacatacacatacccactcacaaggcagttgtttgtagaaagtataaggagaagagggtgagtttaccttgaaatgttgcaaataacttcatatttagacattttagttctaaaaagttttctcatcatgtggagagttttaatggctacttcacctccagagaactatctcaatggcttcccaccttttctctctcccaatttacaaatttataatttattaaaaatgcagagccaatagccctcccttttattgacttggttcgtatcatgtccttagggttttaccttctctccaatctccaagtgtatttttttaaaaaaaaaacaaacaaaaattctataccgtaatgctataagggcttaagttgagatatatatctaaggcattagagagagagagatctcaactagaaattcctgttccaggagttcagaatatggccccataggccaaggcaaatttagaccagaatacctagcctttgtctgccaattacttagaagtgacttcattgatttgtgttaaataaatgaagataaaatctgaatgaaccttaaaagtgggtgagaattagtctgccttcttattctccaaatagacttaaatcagagaaatttattgatgtgtatctgtgtttaaatgtatccttactttttgctgtttcttaagattcagaatttcattaagtctcaggattctaatttctaagttataaaactaacatattcttgagtacagggatttttttaaaaagctgggatatcaagtttttctataaactatgataattcatacataattatacctgacatctagcatttatatcatggcagatgtggaaagaattgcatttatttttgatggtatttaacaatctttctatccacgaaaaattgtgggtcttgtgtgtctaaggtaaacaagtgcagctctttagctcatctctgcattccacatttgcatattttactttttcccccgattcctttcatgattgtttgactttgcctatatgggtagaaggggagagggaagaacagaccagtatttgttgtactgaataagtttcgaacacagggagaactgtttaatttcactctcatgacggttagatgggagctgtaagcattagtgatgctagttcaccatgatgcaaattcagctttcttctcaattcctgagattggaagtgctgaatctgcagctgctgtgatattagtctctctttaacaaaatttttttaaaacctctagcatctttcatttatcttggaaaaaccaaatatgtacatgctgtactttcattttctaaagtttcatttagaacagatgacatgtgaattttttccaagaaaaaaaatagtttcttatctgctttgacttgttgattatttctaagtgctcaattaccgagagcacttcttgggtctagctcttctgctgatagaacagcaatgccccctactgataaatttctgaaaacctttccttagaaaatgagaacataaacctctcacttacaggcacagtattcaccagcttcctctgaaaaagacgtgtgcttctaggctcatcttagtgtgacttattagcctctcattagtgtaatttcctgaattagtctttgctaaagcrgctatgaagttattccatgcttggctggctttataaaaaataattttaaagatgtcagcagagctttatacctgacaaaatgggaaccagaactatttgattatagtaatgtaattcctgttacattatatttatatttagagtgggagagttcctcataataccttcatatttgtcttactgtttcttcagtatttatagaatttctggtagagagactttaaagcctgttgttctagatttacttgaatgccttctagtattctctccatcaagtaattgccagggttgtgcttggttttccctagcaatagaaaacacactacctatcaaagcaaactatagcatctatctttaaacaattccaaaaaaagtcaatgcaaatttttttctgtttaacttccaaatacctattggaccaattttaccctctggctgttatattaacttttgctgtaacaaatctaatttctcataattcttctaatatttgaacagaggaatcacatccttctcctggcattcttctcttccctaggaaaagtaataactatcagagaaaaggcaaatatttctataaatgtggaccaaaggacagaatgccagtagaatatataattcctatttttaaatcatagactaattgttaccctctctctctaaactmacacacacacacacacacacacattttcttcatagttaccataatacacttgaaaaaatgaccatcttttttttccttttttagttaacgtgtaataactgtacatatctatgggttatagtgatattttgatacatgtatacaacgtgtaatgatcaaatcaggataattagcaaatctaatacyttgaacatttttttctttgcatgtgaacattcaaaatcctctcctctatctttttgaaaatatgtattattgttaaccctcaaaagcaaatgtaacaaaaccaaaaacagacaaataggacttaattaaactacaagccttctgcatagcaaaataaataatcagtaagcaaacaacctatagaatgggaagaaaatgtttgcaaactatatatctgacaaagtgttaatatccagaatctacaagaaactcaagaaaaacaaactcattaaaatgtgggtaaaggacaggaacaggtatttttcaaaagacaacatacaagtgtatctttaaatgtgtgaaaaatgctcaacatcacaaatcatcagagaaatgcaaattaaaaccacaacaagataccatcttacaccagtcagaatggctattattaaaaagtcaaaaaacaatagatgttggctaggatgtggagaaaagagaacacttatacactgttggtgggaatgtaaattagtacagcctctgtggaaaacacaatggagatttcccaatagaactgaaaatagaaccaccaaatgatccagcaatctcactactgggtgtctaccctaaggaaaataaatcatcacataaaaaaagatacctgcgctgttatatttatcacagtactatttacaatagcacagtcatggaatcaacttaagtgttcatcaactgattgaataaagaaaggtcgtgtgtgtgtgtgtgtgtgtatagcaaaaattaaggacacattaaacacagatacacatctataaatttctctgatttaagtctctttggagaataagcctatatatacatatagsctatatatatattccattgtgtattccattttatagatgagtagtattccattgtgtgcatatatatatatacacacacacacacacaaaattccatcatatatatacatatatatatagcctatatatatagtctatatctatatatgtgtgtgtatatagcctatatatatatatacatataggctatatatatattccattgtgtattccattttatagatgagtagtattccattgtgtgcatatatatatatatatatatgctatatatgtgtgtgtgtatatatatatatacacacacatatatatatacacacatttctctgatttaaggctatttggagaataagccwatatatatatatatgctatatatatatacacacacacacaggctatatagcctatatatatatatatatatatatatgcttattctccaaatagacttaaatcagagaaatgtgtatatatatatagcctatatatacgtgtgtgtgtatatatatacatatacatacatatatatagcctatatacgtgtgtgtatatatatacatatacacacatatatatacayatacacacatatatataccctatatatatgccctatatatataccctatatatatacctatatatatacacctctctatatatacctatatagagagaggtatatatacaccctatatatacatcctatatacataccctatatatatatagggtatgtatataggatgtatatatacctctctatatatagaggtrtatatatatatatgggtatatatatagggtatatatatatgatggaattgtgtgtgtgtgtatatatatatatgcacacaatggaatactactcatctataaaaaagaatgaaagaaagtcttttagcaacatacttcgatggaattggaggccattatcctaagtgaaataactcagaaacaaagtcaaatactgcatgttctcacttgcaagtgggagctaatcaatgggtacacatggacgtagagagtggattaatagacattggagacactaaaaggcggaaaaataggaggagagtgagggttgaaaaattacctgttgggtgcaatgtctgctattcagatgatgggtaggctaaaagcccagacttcacctctgtgcaatatattcgtgtcacaaaactgcacttgtactccctaaatacataaaaataaattaagattattgttagccatacttatacagaacaccagaagtcattcctgccatctagttgtagctttctattcattaaccaacctctctttatcctcctttccttcttacccttccagcttctaacaatcgcagttctattttccccttctatgagctcactttttttttttttagctcctacacatgcagtgtttctctttctgtgcctgacttaacataatatcctcaaggcttactcatgctgaataaatagctgaatttcattgagtgtgtgtgtgtgtgtgtgtgtgtgtacatatataccatattttctttatgcatttatttgttggtggacatttaggcaattctgtatctttggtattgtgattagagtggcaataaacgtgggggtgcaggtatcacttccatatacttcctttcctttggatgaatacccagtagtgggatggctggattgcatggtagttttatttttagttttttcagaaagttccatactgttttctacaatggctgtactaatttacattcctaccagcagtgtatgagttccctttttggggactagaggtgggagagagggaggtaagggtagaaagactgttgggtactctgcctagtaatgggtgatgggataattcataccccaaatctcagaatcatgcaatatatccaggtaacaaacctatacatgtgcccctaaatctaaaataacagttgaaaaaataagatttgattcctaaaaaacagtaacagttcctttttcattgcatccttgatagcagttattttttcataataggcattctaactgggatgagaaaataattcatcgtggttatgatttgcatttccatggtaactagggatgttgaacattttttcatgtacctcttggccattggtatggcttttgagagatgtctattcggatcatttgtccatttttaatcagatttttattgttgagttatttgagctccttgtatatcctggatatccccttgttagatgaatagcttgcaaatattttctcccattctacaggttcttccttcacactgttgtttcctttgctgtgcagaagcttttgagtgtgatatagttccatttgtctattatttgttgttgttgcctgtgcttttgaagacttacccataacatttttgcctagaccaatgtcctaaaacatttctcttaagttatctcctagtagttttatagtttcaggtcttacatttaagtctaattcattttaagttgatttttgtaaatgatgagaaataggggtatagttttattcttccgcctatggagatccagtttttttctgcatcacttattgaagagggtgtccttttcccagtgtatattcccagcacctttgttgaaaaatcagtttactccgaatatgaggatttatttatgggttctctgttccatttcattggtctgtatgtctgtttttataccaataccatgctgttttgcttagtatagctttgcagtatattttgaagtcaggtagtgtgatgtctccagctttgttatttttgctaagtactgccttggctattcagggtcttttgtggttccatacaaattttagaattgtttttttctctttctctgaagaatatcattggcattttgatttgggatttcattgcatctgtggatttctttgggtagcacagtcatcttaacaatatcaattcttctaatctattaggatgacatgaaaaaattactgtctttgaactaagtagaaaagagacaatttcagcttctatgaaaatgtgacttgaatgttcttcgaaagattcaatctcacggttccttcataaatgccttgaaattgttatccaacctcccttcttagcccacatatttttaagcaagcagtgtcagacgaggatttccaataaagttgggaaattactgaagttggattaaggtttaggaaaatcagccaatgtcttacaaggccaactggatctttgttaaatgcttgtcattccattgagtgccctgccacttcaggcagatgtagaatcaggatcctggtgctttctgtgtaagtctcattccctccttttatttgcagtgctatttgctaagtgtataggtagccaataatgaaggcattgccatacwttacttgaacacggtaaaacaagcaatgaccttaagccattaataactgggaccaatagccacacaagtgttcatgggcttgttttgctaccatgtcttcaaagttgctttttgctattataattttctaaaaataatgcaagatggttgtatgtcttgtgttctttccaaagcagacactgagatggaataggtacatgaaaggtttattggggaatatacatgtgaagagagaggcagcagwactgggcaagtggagacattgctcatgatgcagacagatgaggtctctgtgagcctaagggagttgttctagggcaaagattgctcattcaaggagtcctcagttgtacagaaatggctagaccaggggtgtccagtcttttggcttccctgggtcatactgggagaagaacaatttccttgggccacacataaaatatactaacactaacagtagctgatgagctttgaaaaaaatcacaacaaaatctcatgttttaagaaaatctatgaatttgtgttgggccacattcaaagccgtcctgagccacatgcagcctatgggctgctggctggacaagcttgagatagaccttcacaccccattttggttagccattgactggggacacctaagaatgtggcgttggctaccattgccttatggcaatggctactcagccattggctggggccttatctgaaaagagcaagctcacagctcagatatgaggtagacgaccctgaaggagctaacagctggagggtgccagataatcacattccttgtaactgggcagcraaacctttcttgaaggaagatctgagtggtamaagtcagtttttggcacaacggtttatcgttaccaaatcaatcaatcaacatttgtagtggttgctttagctgtttctgggtaacaaaccaccctattttaatagttaaaagccccaaatgtaatcatttattttttaaaatgcattttattttgcacagaaatttgtggatcaggaattcagaaagaatctggctgattggctcttgcttaggcttttcatgtggctgcaattatctaagttatctaccagggaatccaaaatggttcagaagtcattggcagttgaagctgcctgttagctaggagtttgctggcactaacagcaccaacatgtgtcctctttatgagccttgggcttctcacagtatgaaaatgagtgagtgactttggagtgtgggtacttcaagaagagacattccaagagaccaagggaggagctggaattctttttttttttttttctctgatatagtctcggaaatcttgccatacccttttaatcccatgctattggtcaagcaaaccaccttcagggagaggagaattagattcaacctctcagtgagagaagcagcaaagaacaaattctttgctgtcaactttgatcttccatctttgtgttttattagaataagagtgcttgctctcaattctattacagtagatactgttaaaattctttttgatttgtgatgcctcaccaaaatgatttccatttcttcaatcattgcttctttgacatgatgttggtgcctgattgttctcttaatgtttttcagtttatatctgccttaatctaagagcagcatcataccaagtattctaaatatagactgatcaccctacagaaaagcagaactatcactgcctatatgttctagaactgctaatggagccatgggagacagaagcttttgtggaagtgatgccacaatattcatgcacattgagttaacctattccagaaacattaattaagtgctcactgtgtactggtaactataagtactgaggctacaatgataactagaacttggcaactttccttgaggagctcacagtttaatggtgagcattgtcatgcaaacaagtaattattgttctctgtcatgtgctataacaggaaaataaggctctaagtgaacacagaggagaaaatttctaatgcttcctagaaaaaataaagaggtttcrcagtgcctgtgaacacttattatgcctcaaagaaattcattaggcaaagaaatgaaagaaagaataattgtagcagaaggaaaagcatattaataggcacagaggtataacaaagtgagacacatgtaggtaaccttacctgaagtagaaatgtatgattcatcaattggatatttgcaggcgacagctatgagatgaggttggaaaggtagagaggacccaggtcgtcagaatcttaaatttcacagtagggagttgggatttttatcctctagaaaaaggacatcaattaactttttagaaaaaaaatatattagtggaagtgaagcaaatggactcttctggaccagagcaagacccaaagttgggaatctagctaagagacttgtgctggaaagaagtgatgagggcctgaattaaagagcagcagatatgaagaggaacagttttgagtcatattaagaatattaaattgatcagatttacagtctggctaaatatggagtgtagaaaagaaaggaggactcatggatgactctccattttctgtcttgagtaactgtatagatagttgtctaattttcagagaargaagtactgtgagaggagccttcaggaggtggagggagggaacattatggttcagattggaaaatcttgactataaggtgcctaagaaatttctaggaggagatgttaagtgtggattaagaaataagggtctagagctcaagagagtgttttgggctggtactctaggtctgtgaatcatcaaagtataggtggtagtggaagccactggaaaagcttagtagaaagtaaggtctagaacttaggaaaggggttcacatgataaatgaatatttcaacatacaagagatagctgaaaccctgggagtatatgacattcctcccagcacagtagggaaagaatacggagttgatggtagaaccctggaaaacatgaccatttgaggtgtgcacatgaggagaattgatgaaagagacttgagatggaattctgagagctaggaaaataaccccaaaaaaagggaggttagggcagagatatattcaagaaaaaatggagtgaacaggagtgtcaaatgctgcagagacatcaaataatgttaggactgaaaagtgcctaatgaatttttcaattaggaggttattgatgactttaatgagatgatttgagaagagtggaggaagtcaatgaagttaacccccatgtagctttgcagtgtaggaatgtaaacagattgagtaaaggcagtaaaaatttaaaagaaaaaaaatcaaagcatggctttattttttgttttgttttaaatgttgagatatgttcagaagcagtgaagatgaagagattcaagattcagaaagacgaaaaataattaatagggttacaagaaagctaaattagttgacagctgagaatgaataatttttttttttggtatttctgttaagttacatctacgctctctcatcatcacccagtatctgagcatcacccagtatctgagcaacaaattcttttagaacaaagtgttaggagtttscattttttatctctatgatttaaaaaaaattcagtctctcatttcagatatagtattgactaagatagtaggttatttgcacatataagtctctataatttggagataatcttttttctaggttgacatacaataaaatgcatctttgatgtagtgaaaatcatactgaagacaatgttaaaaccaaaaatttttattcattaaaagatgccataaaataaaaagttaagccaataaatacctgggaaaatttgttaatatgtatctgatagaagattagtgtccagaatttattaataactacaagtcaactaaaagaaaaatagaatgcaaaaaaacacataaataggcattttattaaagaggaaacatgaaaagatggccaaccttattagtcattagagaagtgcaagttaagaatacaatacacctactagtactatatttactagctgaaagactacaccaagaatggatcctgtgagtakttaagaattctaaaaccctgctgctaagcatggaaaagaaaaaccactttaaacacaatttggtgttatcttacaaagttgagtgtgtacattaacctatgttccagaaactccacttgttatcacttgccctaaataaactttatacatgtctcactagacatgatcaagataattcatagcaattttaccttatagcaaaaaaaagagctcaatttaaacaatgaaaataaatgaacttcagctacgtgcaagaatgtggataagtattgcaatataacgtgtggtgaaaaaacatgactgatataccatttttatttaaatatataatttaggtaaacatacaatgttcaatgaaatgataaatataaaattcagaaaaatgttgacctctttagggattgtatcaggttagggttgcaacaagatacagtaggctaagattagagctgtatatatgagaagtctctgtgtcattgatgatgtcaaagatttggtgatatatctaggtatctattttattatgtgtccaacttacactatatattttttctagtgcatatcaagtattaaacgctaaaagagtaagaatccactggacttgggagagctctgtattcttacccaggttcttttgttttctctggaaccacaaaaaagttacttgtctgatctttggttccctcatctgtaactggaaagactgagtaacctctacagtgctttccagctccaagaatctttagtcccatgagccaaagaactaacatggtctgtaagtcagggaacttctccaagtagctgtcaaattacatattttgacatagactccaaatagggtaaagggacaaagaatattaatctgctaggttattctaaatacatggaaaatccaaataaggaaagacaaataaggktgtatttggttatttgaaactatattgttttacctctgggtcaaagggctacttgaccataatctcccatatacctctcaaaattgaatatgaatatatatatatatatatatatatrtrtrtakatakatakatakatagatagatagatagatttgtataagcactgaaatctagggaaaatgacatttaaatggcaaaagtctcaatatctccagatatgacacagattgactcataggaagagagaagacactgaggccaacttaacaaacttcttacccaccctaagaaaggagtagtagcacatgaaataaaaaacaaaactccttagaaaaactctattaacattccctaattaagaggacagggacagactgtgggacacacaggcttaaaccacttggctgacttttcaccaatgctaatcaacatactagcaaatgataatagcacatttatagtgtgtactatatgccagagatagttctgagctcttcaggtaattagcttattggtagatactattgtttccattttacagatgaaggaactgagttatagagaatttaagtgattctctacagttagtgagtggcagaggcaagatataaacccaatctcttcccttctagagtctggtgccttaatcacagaattatactatcyctcaacagcaaaagaaagtaactatatctggtgcccattgccgtaataccagtgtgtaacaaagcactccaaaattcagtggcatacaacagtaggcatttatttagcttgtatgttggttgtctagaccatactgggccgttttcctgttcttgtctggggacactcctaggtctcagagttaaccagctattgtctgtggtgcacacatctgggagttactttgctgtcacctgcatgactcagctctcttctatgaatctttcacatccttccacctagctaacccagttgtattctcctggcagaggtgcaagagcagttatgaactctcaaatgcttctgcttgtagtcacatcagcacacatctctactggctgaaataagtcactcttcctatttagtgagagaaactacaagggaaatggcatgtgtatatgggaggtctcatagaagaattgaggcctctaactcattaatttaccataaaaccacactaagaggtgcccaaagcagcttctgcggcaatgacaagactccttcctgaagccatgagcagcagctcctggaaggagggacgcccaacaatgtgtcatttggatccaagctttaagacaactggattcagaaacgtggtctccacggaagatttttccatgrgagagaaaaaaacagaagcagcaacacaaaggcaactccagcagccttcctcaggcttctagatgaccacattgggtcttacatcaaccacttagcatctgagaggcgaatttgcacagccaccatagaaaaaggaagggggcctcaagagagatttatgaggaaaagtgttttcagtttctgatggggttgacagttaccacatgtcaatctacaaagcatctctggctggtggttgtctttaggcacttgagagaaagtgggtgtgcagtagtctgggtatgggtagtagtctggtattaccatctagctgctaatgtctgaatcttgcctttcacccatttactaaacaagcacacgtagagcatttaccatgtaccagactctgaaaacacatgagctgtgctgtgtttgcaatcactggggatctcttagtctggagcgctgatttttcactggcccccaggtagagggatgtgtctttcaggcccagggtactccttgaaatattgtaggaattaaagcagcctgattattgctgttctgtttcctaaggctcctcagtctctgaacatgctgagtgagtataaccacctcttaagtatatccagctaagttttttttctgattctcagggaatagagttcttattctccttcacagaaaaataaataaactctgttcaggaaaagggtggcctaagactgggtgagctcatatagcaatactaacaattttaaggatctacttctggagacagtagagggtgaggtataaggtgtcaggtgatgaagctcagaccagctccctgactactcaccctagttatggcagttcggacatcaaagatgtcaaaaatgtgaagacaccattgaaatgatctttcacacactgagttccctaccctctggtggccattgcaagaggtcagaaagcaggcagtcaaaaatgaaaagatacctgtcatgaacaacattaactgtgtaagaatataacttcctgaacctttttagctcagcatgcttggcctaagtcaaatgctctaaatgtatcttacaaagtactttcacatttcattgaataaatttcaactgcaaataccgacaaggcatgctcaggcataagaatcctagtataatagcaaagtagttagagtgccaaatgatacagattatgcattgtgctatgttcagaaagttttaaagaggaacaatcattttcaaaagaaccagaaatcaatcagagaggataaaagtgagaaaaggaggcttagattacttttcataacctccagtcaagcatggatatccacagagtgacagtttttcataygaatcaggagattatgagctctgagatcctttcccctatcatgtgtattaggataattgtttctctaattcaaatctctaagcagcttaatacctgttcttatcttatttcaatttagagaaaacaacgaaaatactgtatctgctgtgtgtctgcttctccaagtgaaactttaaattactccaagctctgagcttaagtggttgaccaaataggttaggcattccttctaaatataaaaaggtgaagaaagactttctgaggccaaaactcaaaaagtggycttaagattgtcaggggagtataataacatcttcctaccaaaatacatctgggaacaacttaatctaagattagagggtaaaaaacaaaacaaatctttgctgcattcaatgctgtgagttaggtagaaccaccatgattataccaaattccacgccaaacttcatgatatgccaacactattaggtgacagatttggggatttatctgtagcaaaagatagccatcctcactgaagccatttggcttcctacaaaattaaaccatcagtgagcaaatgtctagcagtatctcatgctagattgcctcttgtgtgcctctcttctggagaagatgctttgaaactagagttttctcatctcaggaccttgtgggtacttctttaagtgagcttagaaatcattcaagcatgtatttaaaaccccatgatattctatctcattttagaacctactatctaaaaaggtggtaccacttgtgttatcaggggtggcccaattataaacgattggtaatgactgtctggagtaccatgtggaaaagatcaacaggaaagagtcccaaaaattattggcacatctgtcataatcatggatggaggagggtggcgcatatagcatgtttttgtcatttctaattctgttgactctatactattttttttcctcacattttctcacttctttaaacacaggaaatggcagcccggttaggtgtggaaaagtgcttagatcctccacattttgaacaatgaagatggtctaatgtgtgtcattgtctgatcgtttakttaggtgagcgttatgaaatggtacaggtttttctcaactacaaatacccaacataggaatactagaagtggacaactggtcttcgctctggagatagagaagatgcaactcctagaatcccaaagagcaagaaaaggttttgtagctggcacatctcttctcatctcttgctggacaatgggcacagctgtatttgagggcttatgttttctggagatgattgctttcctttctctacattgtcgtccacacccagtacagtagtaggggttcaaccgatattttttgcaataagaattaaatccgtgctgcctagtgctagattgccacaatttaggaaacactttacatgataaaaatgttttttaaatgactgcatttctacgttagtaccaaaggcttattactttttccaatttatagcacaacatggaagagcacaaaacagaagatctagctcttcctcccttctcaatacagccccaccattctgcctcaaagaacactgggactaattctgtcatgccctttgttcctatcttagaaaataaggactctgggtcttctctcaccctgtggttcttgtgcgcacacagctctgtgcatctcgaactgattccatcctcctccttttcaaagagcaccctcttatgcttactcaaagtatgagttgctctatgaattccaaaactcacccgcaatcagcaaaatccattacattcttaaagttgtctgaatagtaccttccctttcctactggaaatttggctctccttaattatattgcttccctagagccctcccaagtggccatgtcttatttcccatatctcttgtactaatggacttagtgacaggctaggtgttgtttttgctcctcattgcttcttccagactaatgtcctgctctcctccttaaaattaatccacttggaaactcttaccatcaatcaataccactaaccctgcctccttgctgcagttatacatagttgttaaaaaacgaaagaagtctttgctgcattcaatgctgtgagttagatagaatcaccatgattataccaaattccatgccaaacttcatgatatgccaacactattaggtgatagatttggggactaaactgtggcaagagatagccatcctcactgacaccacagcacctcccctattctttggagattctgatccttgtccatggctgactgttgctttctctgcaggtctattcttgtcatcacctttttcagtctcatctcctggactcctctttattctatgggttcactaactagctgatcacatactctgatgaccccccaaattgtgtctctaaccaagaactttcttcaattcatattcagctgcctccttcatgtctcacttggatgtctaataggcatatcaaaatatgttcaaaattaaacttatttaattttaaaccgatagcccccaaatttgttccttttacagcctctcccatgtggaccaagacttcatttttgtgcactgttgtttctctactgcctggcatatagtrggtgctcagcaaaagtttagtgaatgaatcattttttattttcacagtagtttaaactgttgtaaagcagggtatttcacttttgctttattatgagagagtaagctagatagaatgttgtgagattgctctggaaatgcaatagcacagcagtgttagaagtattctgagtacttagtaactgatgtgtaagcaaaccattgtaccaaatctgatttttctgcctgccatcttctgctccagtctcgtatagattaccaccagggtcaatctcttcaatgacagatttgaccatgmcactgccttgctcaaaatgcttcggactatataaagaaatttaacttcctctacctggcatccaaaggtctccttttttgagtttcacctgttacttctccatcttcatcctgagatagggcccttgatacaagcagcatcataaccctaaaggtgactctggtctctcatgttcatcaagactttttggttggaaatgacagaaatgagaagagaacgtactggctcatgtagctgtaaatatgtctctgtactgatatagaaggatggttggtcacaatgtattgttgagagaaaagcaagctgtagaacagcatgtatattgtgattctaattttacatatttttaaatctacctatgattgagtgtgtttatatgcctgaggaggaaaaagtctggaaggataaatatacaccaagtattagtaataattaacctttagtgaataaaaaatcctgatgatatgttttccaatttacatatttatatattacaatattctatagaaaaggtttaaacttacacttcgttcatggtatcaccctgctaatgcaatgccatcatatgccatccaatatggagccagtagctatgtatggccacttaaatttaaaagtgaaataaaaaaattccatccatcagctgcactagccacatttcaagtgctcaagagccacctatagctagtgcctgccacattgattgcacaggtatagaacatttccataaatgcacagtgttactcccacaatgtgaaacacctgtcaagctagatgaactaggtgttcacctgattactttctctagtataattggcttcrtttagatgcagccagagggaagcaggtgcaggtctgaacacttgtgatctgacagccacaaggagtttgaccgaagtcccaatctgttcatttatgcaggatccttaaatgtgtttgggaaagacattatcttagtggcaacctattgagtaatttcaaagggaaataagaaaaatccttatccattaatttttaaaggaaaatgagaacatctgagtctctttgcaacattgagatttacctgttttaattagaaaaacaaactgcttgacctgagagaatgtttttccttttcatcttatttgcctaattccgaagtaacttggccatgctcatggagaaagaagaatcatgttcctttctggcaaggaaattaaaacggtaccataagtacttctgtttaaaactgtttgaaagcaaatgtaggaaatgcttaccatgtttcctaagttttttttttaattgatttgttccatgtggcatgatgaaaactcgatgttcgttttatgttttcattctaatatggagtcataaaatcatttttcattctaatgtggagtcataaaatcatttttcattacctaagtccctaatttaaaaactcatgatgagaaaataattcttattataaccaaaactcttttaaaaagatttgagataagtgtgattttaatatttaaatagaactttattatatctctgatctcctttgaaaactatgaaacagtaggttcatgaaaatattcctcattttttagagcaaaattattacactgatagctgtratgaattacagtggagggttccacagcatttcatggttgtggacttttgtacaagagtcaacagcaatcaggtgtcttttttttttaatttgataaaagacgaagaatgcattagtggccaggcatggtggttcatgcctgtaatcccagcactttgggaggccgaggcaggcggatcatttgaggttaggagttcaagaccaacctggccaacatggtgaaaccccatctctactaaaaatacaaaatgagctgggtgtgatggcgtacacctgtaattacagctacttgggaggctgaggcacgagaattgcttgaacccaggaggctgcagtgagccaagatcatgcccctggactccagcctggttgactgagtgagactttgtctccaaaaataaaaaaaaaaatgcattagcatgcagcatgattcttattttctactcattctgtttctttttcaacaagtcagatttattacaaccataaattgagaaaggcagtattttgggtctattatcaaatgccaccttttattcaacgtaaaaccttctaagtctataggatgctaaatattcattcatgggctctatttggtctttgcgtctaccaaattgaattaattatactgcccagtatgtggttcagtcatttgatgatttgtcctcaccattccctatcctgactctaatgtatttattatatgcccttaaatatgtatataccctgaaaagtatgtagtgtttttagtacatgtttttaacttagataaaaatcattgtactacgggtctttctctgcttcttttctgtttttcacttaatggttttaagctttgtttttaagctttttagtcagtagaacataatgattaagagtagaaaatctagaccagcagtccccaacatttttggcaccagagaccaattttgtggaagacagtttttccayggaccaggggatagggatggttttaggatgattcaagcacattacatttattgtatattttatttctattattattaaaatataacatataatgaaataattatacaactcaccatacgtagaatcagtgggagcycttagcttgttttcctgcaactagacagtccatctaggggtgataggaaacagtgacagattatcaggcattagattctcataaggaacatgaaacctagatctcacacttgtgcagttcacaatagggttcatgctcctatgagaatctcatgtcaccgctgatttgacaggaggcagagctcaggtggtagtgtgagcaatggggagcagctgtaaatacagaagaagctttgctcacttgcctgccactcacctcctgcccagttcctatcaggccacagaccaggggggttgtgaatccctgatctagattatactacatagggtgaatgctggctcttccatgctgtgtgaccttatgctaataacttaaactctccaatccaatagttgctaatatccactttgtaaaaatataaggactgaatgaatgtgtgtaaagaactgaggcttagaaaagtattagacwtataagagccacttatgtgtttatgaaaatccaatacattattttttaacaattatgtaatattccatcataggcagtacctcattttacttattttcctgttccctccaactttttaaccaaaaatgacactgtattgacaaccttatgtctttccttgcacaaacctgtgggatgtataccaacgagtgtgactactgggttatagggcatatgcacactccccttctccaggcagtgccaggttgtactccaaaatgtctgtgccaacttaaaatctcttggctgtgcatggtgtttccatttgcctatattctcatcaacacttattatctaaccttcaaatttttgctaatttgattagacataaaaatagcatgtcactattgttttgatttgcatttctccattagtgagctcatgtatatgaaagttagtcatttggatttctctagcatttggctggtaaatgtttaactcctggctwtaggggatgatgaaagagaagggagtttgatttgttgtgcagtttgtcaatttccatggtataaatactgcagcatgaccaatttcaagctaccctttagcaactagctcatgaaatttcataataggctctcataagatggcacaacacagctccaggacactattggattgttccctctagaaattgcttattcataactttgcccatgtaaatatttgatttcctgtctttcccttctggatttacaggagtttgttttatatatatgatgttaactacatctgtgtttcgaagattgcaaataatttctcccactctgcaagagttaacccttttgttaactttattgaagagttagtttactgaacagaatgccttgaagtttgatgtaattatttccatttttttgctttggcctttgctttagggatcttatttaagaaatgcatcttactccaaatgtgtttatcaaacaccaggtttcattcttgctgcctgggattcaaagatgagttcctgaggagcttgcagtttaggggcaagaaaacaacatgcaactgagtagtggcaatacaatatggaatgtgcttatcattgctacatttgcaaatatttagatgtgcctttgcaaagcaaaacaattttccccaatagtgcatctatgtgaatgattaaagggtctgaacttcacgagctaggagaggtaaaataataactccttataacttcacaaagcatcctagtgtcttgggaatttcatcttgtctcctttgagaaagttgtccaaagataaaagaacttgagatgaccttacagcagtggtggagccaagtccagtgttccattgctaacccatttctctggccatacrcatttgctgctgctcctcttagtttccgctcctgctcctccctgtgcttccttaaaaaacaacaacagcagcaactcttgtattattatcctttaacccaactgtttgaactgcatcctctcttttgaaactttctgcatatagcttataagctttaaaacaggatatatgtgttttacataataattgatagaaactcaagagtttaatttttaaaatattaggtaggtgtttgcttacacgttcatagaatggtgtgatcacataaaactacacccagataagccttgaagaaatatacgtaagtcttttagagatatagatggtgatagtgatgctgagcctgactgcattgaagaagaactatcttgtgaggagttgaggagctccaagccatatttttcgagggttcagggggtaagcagacagccactgctgacggcttcaccagaattgctccaaagcaacccagagatccaaaagggatctccgtaatcgcagaaattccaggggtggtgctcattgtaaagtatgttgttgctgctattattgtttgccacattctttcattctcctttcttagcttgctatgacatatgcataatagtgaatagtgtagcaaagaacctgatgtgggggtccctatgcctgaactatgagatggcatttgtctctgagttcctcaaaatggtccaagcaaaatgttcctattttgtaaccacaattgaggtcaatggttcaatgatcaagaacagatagtatatttatcctgatagaaataaagattgtagcaatacaaaaggcttttattaaatttgatgcctgtaaacaggttgcttctaacacccccaagacaaataaacagtcatactttttctctccctcccttcttctttccagttcagaaactgtctgcatttcccaaattcagtttcatgaatattctttatattgataatttagtgcgccatgggtagaaagtgggggaagctctgtgttcaaatgagtttaaatgactgtatgccaaaatgcatttctgggaattccacaataccagtaggccctgagaatcttccagtaacaaaatctgtcaaattgagtttaacccaagatttcacaaacttctcctggccccagatacttatctctctgtctcatgtccccacactccctcttctttcccagagcacttattactatcttgtatattggagaacaccactcagaacacatttatatgaaaccaatagtttagttttaaccaatgtaataatatgtcccaaacagtttcatatcatatcacaaactatagactctcacccacttattcaaccaatattttattattatgtgcctgtgctaaactggggttacagatttgaaggatcctttcccttagggcctcacatcttggtttagagggattgggatagtcacacctcatgccagaagggcacagttcctggcaggtgagcacaggagggagccatcacattatgctgtgaagacttccgagcaatttcaggagctttagtgttcatctaagccaatgtccatccacttctgggttcttctttataattcgacaactagtgttctgtactagaatattctggtgatagaaaacacattacatgctcccatcctcaaataatgaaaagtacagcatcaaatatatcacaaaaccccatacaacttaatcccaccatagcccatccataatgattaggcaaacttcttttgttgggctaaaatcctatttttttttagattaagtggattaatctatttttaaatccttaagtaagttatctttattttgkacttacaacatcatacattagggttttaatgtggatattattatagcatgaacaggccaacaaaattaattataaaagttttctttactcttctgtctaggtttaagactcaaaatgactgttagaacaagggaaaggctaaaagccacacgttaggcagaaagttaaaccagtcttcccaaagccagttcagtactcatttttgtacaatgcctraagctgcacaagtagttaatggtcaatctagtactgcatccaggtcttaaaattccgaaggccatacatttctattacaccatgacagccagctcaaatgtcactgctgccacatacttctctctcagagttaatattcacttcttgatgtcattgtggtgtctgtccatccttccttccatctttctcagccactcatctatccatctgttaaggtataaccaattgtgttataacactgataatatggtcacatcatcatatccttgaaaagctaagaacttcatctttatatttctctcatccctctgaggggcttggcacatgattggtgtgtagcaggagtttgctgacttctattgytttaccagagagacctcaagttagcaccaaaatcagtttagtttaacgaaagatatagcggaactataaaattttagaccatagagatccttgatggattgcatctatcccctgtccctcccttaaacaagtgaataaataagtaaaatgcacaagtcatccatgaccttctattcacagaattctcttggctcgtcctctcaccactgtcactttctcatgcatagcatgtgtattcagctctgccctttcccttctttgaggcagccctgggaargaccagagctcttgagcctctcaggctcgagttctatgccytttgctctactgatccttgcaattattgactatcagaaacttgctgtaggattttatatttatcccaaatgtcagaatcattttgaatttttaatcttgctttctctgatattagctatgcctgccagttttgtatcactatacgtttaacattcttctatgtattcatccatgtcattgaattaaaaaatccctagcagcaaaagatcaaagagaaaattttgtagcccaatttagtttaagttataccaaatatttatcccttccttgatgtagttgtaaatctacttagtaatattattatatgctctacatttctccatatcatccacctataaacaaccactgagacactggaggaaggaagtactaaatgaagacaaggatgtagtatttgtatttattcttcaaggagtggccaagtaagaaggtgaaggcagcccaagaagagaggtagacctatgtattctccgctaactaagaggccatgcctgatgggatttgctggcttggactctattcgaatggtaggctgcttctatccattaccaaaaaatatgggcaggacaaaggccagtgtgttcaatgcagagaaaattgctggatttacctagaatagctgtgtcttaatctgggctgcaatagcaaattgtaatagactaggaagcataaacaaccatatagcttgctgttttgaaaactgggaagccaagatcaaagagccagcagattcactgtctagtgagggccctcttgctggtttgcaggtagctactgtgaaccccatacatctaagacaggtctgaatttagaaagtttatccaaggttaaagagacatgcctatgatatagcctgaggaggtcctgatgacatgtgccctaggtggtcaggacacagcttggttttatacattttagaagacatgagacatcaattaatatatgtaagttgtacattggttcagtccagaaaggcgggacaacttgaagcagggagggggcttccaggtcacaggtagataagagacaaatggttgcattcttttgagtttctggttagcctttccagaggaagcaatcggatatgcatttatctcagtcagcagggggatgactttgagttctgtctgtcctttgyccacaaggcaattccttgtgagggaggcatggagctttttaatcgttttttagaaatggaatgagagacaggttttccctaagaagttcccagcttgacttttccctttggcttagtgattttggggtcccaagattcattttagtttcatactgcctccttgctataacctcactgaggccaggagagagagatcagctctctcatgtctcctaagaacactaatcctattcatgagactgggaccccacctccaaataccatcacattggggatttaggctttgaaatatgaatttggggagaacacaaaaattcagcccatacaaagtaatcactgaagattttggaggagtatacagatataatcatagctataccttaggatggttaactctttagcagcagggtaaatgatggcacggagaggttgagatcccaaaggcagcaaaagcaggttggacaagatttcaaaagtgcaggtgagagaatgtggaagcctgaaggtggcagtggcagtttgcataaatgagataaatgtaaggagacccttcagtaagactttggcaactgaccaggtatggcgtgaagagaaagctaggggaaggaggagtctaagatgacactgagatttctagcctgtgtaactgagagaatggtcgttggatttaccaggatagggaactcaagagaagctgcagcctggggagaggagaaataatgagttccagtttagacttgtggcatttggagtacctatggaacacatcaagttggtggtcaggagaaaacccagagctacaaatgatgataggagagtcaatggaatcaatataagaatggaagccacgaaaakagatgagatctccctagaagagaacatagaaagaaaatgacaaaggggttaaagatagatcctgggtgggtaccaccatttatagaccaggctgaagaaaagggaaaattaaagcaacaatgttttcagatagttaagaaagaagaatggaggaagaggagacctcagtcaacctctactatcaccccaaagtaaaaaagcactgaaaaggaagagcaaatagaaatttaaaagcaagaaaaagakctgagtacttatcaagtgccaggcattgtactaagctttttatatacatcatgtcattgtgttaattgcaggttttcagtgtaaaaagaacagttaaatggctccagaggttcagattgaggtaactcattatacctcacagagtagtgttaagtatcatgtaagataatatatttaaagttacatagctgattacatgggcaatcagtaagagtcattattattatttctttggacttacttttataatatctgtcttccctgacagaaaaccccatgagtccaaagaccatggctattttaacatttttgttgctcagtttttttaactaagtattattgatgtctgtgtatagtagacactcaatattagttgaatgactggatgatcacatttcgtctacatatccttgcctgtgggcacctctttagtccttaaagaagaggggatgaattctcatatacacactggtacatttgaagtccctcagttttcacaagaggatgtccttcttaaccacactttaattgctttaattaaaagatataggtctgtcatggaatcaacctaaatgctcaacaatgatagactggataaataaactgtggaacacatacaccatggaatagtatgcatccataaaaaagaatgagatcatgtccttcgccggaacatggatagagctggaggccattatccttagcaaactaacacagacacagaaaaccaaatactgcatgttctgacttataagtgagacctaaatgataacacatcgacacatagaggggaacaatgcacactagaacctactggagggcagaggatcaggaaaaataatggatactagactttatacctacgtgatgaaataatctgtacaacaaacccccatgacacacatttacctatgtaacaaacccgtacatcctgcacatrtacccctgaacttaaaagttaaaaaaaaaaagatatagctctgtatttaactaactggagacttactagaaaaatagtcyctaattcactgctgcccattagtttttagaaactaaactgagaaaaactataccaaggaaggagtcttgaaagatacacagtctatctactcttctaggaaactatttttgttgagtcagacactgctctaagtacttgttacacagtctcatttaatcttcatgataatctgaagcattaggtactatagtattattaacccagtttttcaaatgraggcacgaaaatttagaccacacacctagtaggcagcacagctggtttccaacctaggcaatctgtcctgtactcttaacctttcattatgctgtctctctcaagttcaactgcagctgaatcataatgcctacctcttccattctatttcagagtcttgtttttgtgagttttgcttatatgaaacctatattaagttgatatgaggtctcatattaagaacagtatcatcaggaaacaatagatactggagaagatgtggagaaataggaatgcttttacactgttggtgggagtataaattagttcaaccattgtggaagacagtgtggtgattcctcaaggatctagaaccagaaataccatttgagccagcaatcccattactgggtatatacccaaaggattataaatcattctactataaagatacatgcccatgtatgtttaytgcagcactgttcacaatagcaaagacttggaaccaacccaaatgcccatcaatgatagactggataaagaaattgtggcacatatataccatgaaatactatgcagccataaaaagggatgagttcatgtcctttgcaaggacatggatgaagcaggaaaccatcattctcagcaaactaacacaagaacagaaaaccaaacaatgcatattctcactcataagtgggagttgaaaaatgagaacacctggacacagggagtggaacatcgcacaccagggcctgtcagkrggtaggggccwgggggagggatagcattaggagaaatacctaatgtacatgacaggttgatgggtkcagcaaaccaccacggcacatgtatacctatgtaacaaacccggacattctgcacatgtatcccagaacttaaagtataatttaaaaaaagaaaaattttaaaaaaataacagcaccatgatactcaccactgaatcattgtttatcctgttacgttgtttacaagaacccaaaggaagaactcctgtctggtcactataccagaagtattctgcttatcctttaaccattggtttgcttttgatcttatagatattgaccaccatttccttattgcattgactgttagacaatttagaatgaagcatgtaattcctgcctctattttatatcaccatatttatttccttcctgcttccattccaacttcttgctgatgctagcttactttatttgatgaaagctgatttttggaacaaaataggaatacataaacacacctcactgcatttttgtgagacgattattaaccttcatatagatgagaaaactgacacttggaaacatttaaagtgtccaagtatgtaacatagtttagttcttaatattctgctgacttatatttgtaacctgactttcccctaggccacacaaatttgagtggagagagatatttatagtaatcatccaaggtttactcctgtgagctctgtgacctcatgcaatctgtctgtgcctgtttcctcaaatgtaaaatggaaataataatgtacttaccacccaccatggttgggcagatgaagagttaatttacgtaaggtgtttaaaacagttcctgggacatgcacaatataacattatcatctctgtctccttctccttttcttcctccctctcttcttccttctctctccttcctccacctccttggctcttgtgtctgttgtatatggaggacctccatcccctctcagggggtcaaacttatttctaaggctccccagtgaggtctcatgggggctgtcaatttatgtgcttcccctctagcctactacattggtttccagttctgtgaatgctacttgagggtttcccaccccagcccttgtgtgcaactattgacatttgtgactaggatgctttttcccaataccaaaaaacatccaaatccttaaagtgtgctattccctggtgtcctggctaagacattgctttcatgtcacaaccgtgtcagttcttaccacctaagctctgatgtcatactccctctgcccaacatttcctttatcccctcgctttatggaattgaatatctatattgatggagctgggccaaaaccaataccctaagcagacaccacacagccctctccttccccatgcatcctcttctccctcatgcaatatccccccttccattgttctccttctatcaagtcccctcccaaccagttcaccaggcacctgcagccacgcataactcccactggggatcagcagacaacctcctacagaagacttgttgttccttgtgttggtgggcatgccccaggtagattacaaattacatggggttggagagcatgtctgagaattcctcaccttcacagcacttagactgagttcagaggcagctcacaagaagagttgctgattgactagctttgatagctcatggccgaaccagaatgagaaacttctttggggacagatatattgtctctggtttgtctgtgsttggttcattgtttgtgtttagtcaccccagattgctcagggccatcctagttttagccctgaaagtcctgtgccccaggaagcccctcagccctgaacaaactggattgttgatcacctagcactaggatgccctttacacttcagacaagatgcttcatgtatactctcattccaaactcttgcctctgtcctactgccctggacacacaggcttacatgagtcacaccatcattatctgattccctgtttccccagcttgtatcaggacatataaattattggtccacagttcctccagacttaacagcctgttggaaaaggttctcatcctcttctctcagctttgtgaccttcacaattattgctcttcttgacatttttacttttctttaaccagcaaagggccttggtagaaacacagtgcttttaaccacaggaagctgaatttcagatattgctggattctgccttctgaagcctcgwggaatgatcagcacttaatgcattttttactgctatattggattgtcattcttggaaagcaacagctgaggaaagtccctggtacatgagctccttacaccttgttatactcccacagccataattgcttctttcacactgacatcttcaacccttccaccagtacttgcacccagcatggcctcaccatctgctcatgtgacaccaacattatggcctccctccatgcattcctaaatggagctgaggaaggcaacagagatagcaagtgtgccagctggcaccagtgacataaacatagacagtgataaatcatatctcaggacagggaggaagaaaggagtatgctgatggctaattgtgtggcatcatcagtgcagtgagatggatctctctgctcatggagacagaatcaatgtgtgttgtttctgttcctgcagtatgtgcatcagtttcctttaaaaatatggtcacaggaggccgggtacggtggctcaagcctgtaatcccagcactttgggaggctgaggcaggcggatcacgaggtcagaagttcgaggccagcctggccaacatagtgaaaccccgtctctactaaaaatacaaaaaattagctgggtgcggtggtgtgcgcctgtaatcccagctactcaggaggctgaggcaggagaattgtgtgaacctgggaggcagaggttgcagtgagccgagattgtgccattgcacaccagcctgggcgacagtgcgagacaccgcctcaaaaaaaaaaggtcacaggagaatgttcaatagaaaatcaactagaaatcaaaatctgagttgttctatttctgcttctgtgcatctctaaatagcattattgggggacttcccagggagtttgaggattgcttgaaaatgacagggaaggccgggcgcggtggctcacgcctgtaatcccaacactttgggaggctgagatggatggatcactcgaggtcaagagtttgagaccagcctggtcaacatgatgaaaccttgtctctactaaaaatacaaaaaattagccaggcgtgatggcatgcacctgtaatcccagctaccgggaaagcggaggttgcagtgagccgagatcctgccactgcactccagcctggaagacagaatgagaccctgtctccaaaaaaaaaaagaaagaaagaaagaaagaaataaagaaaaagaaaattacaaggaagagtttctggcttctggctgctcgggggaagagccaaggcaagccaattcatgctcgtggtgggtggtcagttctgtcacataagctgctgaagctcccacctaccactaccaccctttgggtctccaaggttctctgttctttatgtcctgcaaatttttataaacttttaatttatccagttctctctgaatgctgcttccgggattaaatcagctaggcaactattcaagatttgttctatagatctcaaatttaggcatgtaatgctttctttgttgttagatcttcatttatttcagtgtatttggtgttaagatagttctgttttaagagcttccattccttgtgtttgtcttgagttcttttcctatgtataagtttttgctttcatttacctcattttcacttttttttagaaaaaggaagtggtagcacaaagatacccataaaatacaatcctcttcctacgaaagaggaagctagatgtcattttgatttttatttttttatccagaagcccccatagatcttgcctattcccattcaggtatctcccaagagctgatgaagccaagagagacaaaattgtttccagccacatggatgagacacatgacacacacaaaaatcccagatcagccctttgcagggggacagacggaactccagagacagagccttaaaactgttggaagcctggtgttatttcatcttcaaaacatcaagtcaactggctatgttccttgccatcaggtcaactcacttaacaagtcaagcataaaagaaacagtaacttcatagctttgattttataaactagctgcaatcaggagcacctattagtaggggtagctttggagtatctctctcaatctttcaggaaacatatttatccaagtctcttctctgttgctataaggaaaataaataaaccaattacttcaaacagcagagaaggctggcataaaggttggtgatttacatgtggccccaataaacaactccaagcatggaaaaacacatggaagtgtccagagattactggacagtccaaagttgtgattggagatccacatctctgggagcagaaaacgctagatactagaagaatgtaatccataaacagtcagaaacaagtcatgygtaagggctagtgaatgaagagatggtttgtggcctaattggaataaaaggaaaggtagcaatggatgtagctaaaaggtaaacacctttagataagatggttagaaatttgtacttgaagctgggtgcagtggctcatgcctgtataatcctagcactttggaaggccgaggtgggtggatcatttgaattaagaatcttccctgtccttccaatttctcctcttttgatgcctttcctctttggtatctctgttataatgtgtctcaagtacaaacttctgtctggttttgttttgttttggagacagagtctctatgcagccataaaaaatgatgagttcatgtcctttgtagggacatggatgaagctggaaaccatcattctcagcaaactatcgccaggacgaaaaaccaaacaccacatgttctcactcataggtgagaattgaacaatgagaacacttggacacaggaaggggaacatcacacaccggggcctgttgtgggtaggggaggggggagagatagcattaggagatatacctaatgtaaatgatgaattaatgagtgcagcacaccaacatggcacatgtatatatatgtaacaaacctgcacattgtgcacatgtaccctaaagtaaaataaaaatatacataaaaaaaataaaatctttgatgtgaaaaaaaaaaagaaaaaagaaaatgatgctaatctgctactgtatggaagagttgcagaattactatcccagaagtagaggctgtgctggttccagagaatggtttatagtggggcagagggtaaaggctgtgcttcaatgctgtggctaaagcaatggataggaaaatggatgaggatgccaaaaattgcctctctgtgctagagtttagctactttgcctcccccatcrctctctaccttttcgtataagatgcagttttagatcctgatacagctcagcttttgcttttttcctacagatcaggaaatgtgggtttctagtcctggctttcacactaaccagctgtgtggccttggattagtcattctggggctgaaataagaactttagtcttcttaagccctgaaaagattatgatttccctttactgccttatatgtacttcaaaatacaaacaactttaagccatagatatctaaagatgtcctaccaagttctgattttttttcataactttgatacctttaaacaaatcaacatttaaaaatatattttcttcattttagtttgcctgttttgttaatgctcaatctaagcacatgtttagtttaatttttggataatcaggcagtggtcagttccactttcctcatctatgaaataaaggtgtcagacaggaagaactctaagatatcccccagcttaagtttctgtaatttcatgacctcaaatgtattttctatctacctttattcaccatcttatcttggcattggtgatttccaaatatgaatggaaaaacatgttacatttccatatcccctcagttccacatacctgctaaaaactatatctaaacttcggtgagtatctaggacatctgagtcaaaacaaaaggataactgtgtctttttttttttatgtctgtctaaatcttacgaaggctatatttctataataagatacgatcatcagcaaagtccttgacttactggcagaaaccattttggaaaaagataaaagttatgactgatgtagaatacctgccaataacttagggtgtcgaaatttcccttaacccatctaggatttagctttcctgttaatttcttcatttgtccattccttcgtttactyrtggtttacctacctttcatatttcataaggtaagtctacctgtaatattatatgaaattgctcatgaacagttctcacatctatgtcttgacaactcttttgccactgccttttgacttttcacctctgtcctaaatggctatagtgccttggttcccgtgcatactctgagactctgaaagggtggcagcaggggctgaagctctctacaagcctggctgggatctgcctttcagatgggagctgctcattatttgctggaaggtttatagaacagatgttacaaggcagacaagcaagcacacactcccagagcacgctgcgcctggcacgcacacactcgccaataccaatatcaggagagccgctgctggggtgatggagggagtgtgctctgaggggcaagggctgctccgaagccctgctaatgtctctgtgtggccatgctgtattttcagcttgtcatcatggctgggacagtgctgcttgcctactacttcgaatgcactgacacttttcaggtgcatatccaaggattcttctgtcaggacggagacttaatgaagccttacccagggacagaggaagaaagcttcatcacccctctggtgctctattgtgtgctggctgccaccccaactgctattgtaagtacagaaatagactttcctctttattgtcagatacccaagaatattttctgtctgcttttyctcctctttcttctcttcctgagcattcaccagcagttttatcagtggcatcctatttcagccaaaacagagtgaatggagctctgcagaaaaactcattaacataggtcttgtcttgtatgggtggcttttgtttttcggtatctgaattttaaaaagatgtttttttttaaaaagcatgtgagaatgttataaatcaacaggtatgattggctaatgtgttaagaacagctattgtcctcttgaaaaaatatgctatgagttgcaagtattcacaagagattctgaatgtaagtgctggcactgatataatggctgagattagagtagaatagaatccctcaggccgatatttcctgctgttctcattgaacttccgtagacrccagagatgagagaaattgcttaacctgaagtttgctgtgattcattcttgatggctctggctctgttcacattacatcacattaaattaagttgcaactttaccttcatatatttcattttccctttcatgaggcaaaaaatgggccacacagtcctctacagagattgcttaacagcataaagtttgcagatctgtgttacctggtcaagtgatttaacacttagacattttaatttttattttttaaaatgatatttgggggagttttaaattaagtgtttctgcctaaatatgccataaggtcagattagtcaggatgtgatcttagttcccattcccctccttctcttctaacagctgactccctgaacgctccctcctcccctacctgccctctattcggcagtaataaaaatactgactggcatgccgaggaatatagcaattgcttagatattcagttcgaatattagttttttgtgccaatgttttgcttgctttcagatgagaaatggaatagaattttgaagataaataatatgggcataataaattcatttggctcattgaccccaggctctacaaagctctcccttaaatgataggactgtgctgtaaggactaagatcagcattgatgagccacaacatgatgtatcagaaggactaagaaacaagctttgctgcctaacacacctggattcacatcctgactttgggcaagtcacctcactgttccctcccatacaaaataaggacaactgaatgcttacctcatgcgttgctgtggggcttagaaatgacttagcgcagtgcctggcatttacgaagtgttcaggaacaggraaacaaaaaacctggctggaactgctctttgccctctttggaatcacagaccaacttcctacttctgaaaggaatgaaattccactgagaaccctcattaagacctcttctctccaattctagagtgaagggagatatgcccattcctcagaggaagggtaatctctgtatgyctcttaccagcctacagaataagagaaagcatacaggacacctttccatgtacctcacaatgtgacacactccacaccccacgtaaaactaggaggmcagactcggttctgtctggtatggtttcatggtggctctacctggaggctgtgggctcagtctagaattgggtcctggtttcttcctgtctcataagcatatcgctttcctgtgtattcagacaggcatccctgagtgatccattgacttactgacatatttcctctcttcttcccagtctcaggaaatttcatttatcgttgcctaggttctcctttagttactttttataattatagagattgttttacattttaaaaaaatataaaaaagggaaggaaatggattaataaaaattgtggcagaaagttagtcagaaaatagaattaataaattaaatgtacatctgcctggctagtctataatagaaagtcagacatacaaatacagttaagaaaacatatacttaaaaatgaaaatataaacttaagacttatttaagttgtatatacaattctgtgccaataaatgcttacatctcaataaaattgaaaactctatgaagatatttactagtgatgccttatatcaaattttttaaaagatgtagcaaagctgaatatatgaatgccaacagaataaaattttaaacatgccaaaatatttctcaaaaaatagtactcaggacacacagctgtggaataattttcctcaaacatttgaggaataagaaatctcaaacaatataaaatgtttcaaggccttttcataaatgaaaaacttttccgtgcatattacaaacaagaaaaatatgtatgtaaagcgcttagaaagtgagtccacataaatacccacaaaagcactctgaatagtaacaataactcacttagcagtgttgatgcaagcatataaaaacaaactggtagatttgcctacctaagaataaaaatttccatcagaagtaaagactgcaaaaaagtttgccacataggagactcaaatgtaaatacccttaatacttaaaaagatgagcttcccaaaatcaaaatgagagaggacaagaatagacaactaacaaccagcaatcaatagactrtgtgcatataagtatttctaaattcatcactaaccaaagaaaaatcattttttaaaggatacagcatttttctcatataaaattggcaaatgttttcaaagaacttagtctaygtttacaaaatgtagagactttcatgtaattctagtcaaagcataaaccaatattttctttctgaagagcagtttgttaaagatgtattaagagcttaataaacttcagacccagtcattaattacattttctagatttataaaaatacaaagatttgtatatagggatgttcatgtcagtaatagttttaataattagaaactaggaactagctaaatacacaataccagactggtttaatacattatgtgccagccatgtttttgaaacaccttaagtaatgatggaacatgtttgtaatttaatattaggattttttaaggccaaaaaattgtatgcagtattgtgggtaagatctttttctcttctgtaagagaatctgacctcacaattttctgcctgtttcccctagaaaaagataatatgtatcaattatgtcaccaggtaaaattgagcccttattggtgaattgcatctgttctcagataactgttatgacctgagagagtgcttctgctatgacttccaataacagtgactctggtaacttggcatatctattgtggatccccggaaactatgcctatggagttgttacaccatatattgactcctacagggcatgtggcttttcagccagggtaattcctgcatcctctgaaatgtatgtagcccccattcacctgagctgtattgttctgctggaccactgcaaggacatgtgctaaagataagcaggcaatgctaccctgccggcaagctgtggtttcttccaagtggaccagcaccaaatgtagtctgtggatctgaatatttaacatatcctaagaagatacattgtggatgttgcaagtataatcccaaatttataattataaaaggaatagaaagaaagtaaacattttcaactattatttctgaatggtaatgttagtttttgttcttcatttatacttttatatatttctttccaaattctacatgaatgtatattggttttaaaccaaagacatacctctaaaacaaattatatagtccatttcttttggcaataattacaaaatgaccaaactttaataagacttgaaaatggcaattctaataaaaacatacatcaccaaaactttacaaagaattttctctcctctcagagtaaaagtgataggtcttctttattttaagattttcagcagaagctcttctccaggctacagcttttgatcttatctcttccattaattcattttccccaaatgacacaaattgaaatgtagtacaactgctcccatggaagtcaatgtgatttggtcagtggacagagcattaagcacctacagttctactctagttctcgattatgaaaccccgattcagctttttcattcctttgataatactgacaaaccccccaaatatattacataaatgatggtcacaagaataacatcttttaatatacttatattctgcagacatggcctaatttatcctcagaacagccaaagaacatagagaaagtgtgtggtccaatttctttcattttgagttgagactgttgagactcaagtaggttagatgatttgctgaaggttccacctggttctgtacatgattagacagccacccatttggttccacttattttcctcgcaaatgaggggcattggtaggaaccagggctgattgcagctgataggtcaatggcaaagagcagcgtggccttgctaccctgctaatggcgcttgattttccctcaagacctaaaaatacatgagcagcagcaagacagaaaacagaagaccttttctgataatgctcagggaagtttcatgggaacagtttcctgggaacaaggagttgcattcacttctcctgtcctatcctggtgaggtatgacctgttgcagctcccaagtgcccacctcagcacacactcctgcttctgagtatgcatcctccactctcctcacaatgcagtcatcttttcccaggtttaataagactagagaggcaggtctcatgtcacagctttgcccccagtaactgtgtgacctctgataagccatgttccttctgtgggttcagtttcctcatctgtacccaaaagaaatggttaggctaaatgatctctaagcacctgccagttctcagattccatgaaaactgaaaaatgaacattctcatcagaagctaacatttggaggcttccaaactcccaaatcatgactctctttctggagtttgattttgcacctctgtgccggattaagtgtttcacagaactgcacagttgtttattccttcttaaaaccatttcctgttctctatggagtataatgaagcgtgacgcctcttgggtgatctgtgagacactaactaacatcaaatctcaaaagtgtagctcaatgtggacttgtctgtccttggttttctgtgctccctcaagcacattgaccatggaagaacctagcaccctgcactgctgcgcgtctgcagatgtgcactaatgaccccattcacaattgcagggatgcacaagaaatgcttgaggggaaagactctgctgtatattcaacctgtcatttcctatttctccttttgtgctttgctgtcagaaaagatcagcatcatattgagacacggccacatgggataaatcgcaaaaggccaaggccactgctgtcccagatcttcaggaaaggttagagcatgggggatttactgtgtccccgtttagcccaaagtggcagtctatgcttgaaagaaatctgcagggtatgttctgaccacctggaaaccctggctaactactgcctcaggccttctgaataaactcatacactcagagtcaaaggaagagagcctgtttggataagaggatttactcagcagagaatctgatttaccctcattttatctcagccccagcagcacaaggcatgaaaaaaatggctattaaaccttttttcttggcttcacaatgaagtgacaggggagtatttagtattgaagtagcagaacatgacttccagcccgaggattgaaatagctcacattttgtatgcaagtgtgcgcgcatgcattacaagactcatctagaatttcctaggaaaggaagagacaaacacaacttgatagaaaggcacaatttggagaaaattgtgaatcttcatttgggggtttctgggccgtaagctcttccagcaaatgtaaaaacccagagcacagtgcagatcacaaagtgggctctcaataatgcaagcctgttggctggctgacgaggggtgcagctgccgaagcaaaggagacattgtagggtcttgtacttcctcataatctgccttttccaggctctgaacaacctcatctgttgaaactctttataacattttataattcacatcttttttcccttttgtacattatcacatgacttccttttttaaaaaaaaattcacaacattttctttgttgctaatatattcagtgtttataatttacatttttctggaaaaaatttctagatatgcccattaattattgtggattttttaaaaaacttaaatccattttctcattttctgtscatactgcagatgactgctccaaatctcctttagagattgtttttctcctgacatcatgccaccaagagatatgctttccatcttcaatatacccctcctaataattgatgactagatgattatgttaaggaacttgacaatttgtttcttggagagaatattgtttgcctaaaaatatgtgattttcaatgcattttactttttactctatttttacttcaatgcattttactttttactkaaagtagtattttagctaactcatttaaaattcccatttctcttgtattcactgttcagataaaaagatataagagaacactatgctttggaaatatgataccgccctggtgctstattttatatcaagtgccacctaaagacaccttctgaacgggtggatgtggcctctggagtaagaccagtagagaggctccagtttacaaaaacacttattatcccatttactgaactcttttcagaatcatccaaacagccttggttccatttaagccttgagctttgaaacgcataggaagtgtctagrgctgaattgcatcatttacacctaagagctcttgaactagccaaagttcwgcaagtaaggggacaggaagctctctgcaggtctggggttatcaatgtgacagcactcatcaggaaagattaaagtggagcatggagacattggcagttagggctagcagcagggtctataggttgaaaatctcctgggtaacttttaaacaaaatctaaaacaaaaaccatttctgccttcttggagatgtttattactattgaagcctcccagggagaatattagaagtatctaaaaatccgtaagactgagagccctgaaactacttagagactaatattggggagtatataaagaactctctcctcttcctcagagtgttagaatatctagagtgtgggcaaaatctgatcaccagcctctgctgtcctttaacaacccaaagtgacagagatatcagcaaatgtgatgacttggggtaggctgtgtctactttgctttcagggaaggttacttggtaagggtgaaggcccatgggattgtagaaggaaatgatggctgaaggaagaagcaatgcaagaaatcacgctggccttggagagcttaactgactgaactgcgattgaagcccagttacatgatttcagtttcccttaacgagccctctctttttggctcctatcataatggcaaagatgttggagctaaaaaagcaccttagggatcctgtagtaaaacttcttcatttgacagatgagaaactgacacccaaagaggtcaagcaactagtccaaaattaaacacctggttagggcagagtcgagctagaattacactatatttccttactccaggactgggcacaatgatttctttctcctgtttcaacacacattcttgcctgggtagaccagcaagtacaaacagaaaacataggacatatatatatgcttttacattcactytttaatcctctcaacaactatgtaatacagtcactactttcatattcaaatcattagaaaaagaaaaactgaacctcaaaaagtttccattagttacccaaaatcacacatcaataaaggagagagctgagatttcaactccaaagcccgcattcaggaaacagcaaaaactttgatatcacccagtactagagccacaactagcatatgtatgaccacaaaatatgtattctgggaattctaaatgcccttttaaattgcaaccacatataacatgcagtgaaatttccttaaaatacaaaattataatacatctttcagtgactagttttttccacagactgtttatattctgaaatctaaaaacttcctctaaactttttgtattgatatcagttatttattgcgtaccacatgttttttaaaatatttgtgaagaagagggatggagcaagttggtggaatagtgctatccagtaatcataccccctccaactgaaacaacttgagcagctatccatgcgctaaaatagtaataccttcacaagagctaagtaaaccaggcgagagatcagagtaactggttggaacacaataataataaaagatgcattgaaaatggtagaaaggagaattttacattacctgcaccacccctcccccaaccatcacaacattgagagagacaccatccacttrggggaaagagaggggtgtgagaacaggactttgccttggaccccaaccctgggcccaccacagcgaaatccagcatcaggcaggctggcaggcacccacagccccagactccaragtagtatccacaaactgagtcccagtcctgggtgggaccctgcagtcccagacttcaagcctgtgaggcagagttggtctcccagttgtactaccgctggcttgacttcagtgtctataggatctggacaggccagagcagcaggcaggcctcagcagcccmaggttttgggcataccccacccctgtagtgaccctgcgattcagaaccaagcttaatggcctgtccaaaatctctgaatggactgttgaagagcttttccagcaaagccaatctgcaaagactggaataagtacctacttctacaaatgtgtatatctcaatacgcagccccaagaacaatcagtaaaacatgatatcaccaaagggacaaaataaaatgctgctaactgaccataaagaaatagagatgttcgaactcactgacaaggaattcaaaataactgtttttaaggaagctcaatgaacttcaagaaaatacagaaaaacaatacaagtaaatgaggaaaacagtaagtgagcacaatgagaaatttaacattatatttagcattatataattataaagggattaattcagcaagagaatgtaacaattgtaaatacatatgcacccagcactggggcatgcagatatacaaagcaaaaaattattagagccagagagatagacctcaatgcaaaaatagctggtgatttcaacaccccactttcagcattggacagatagttcagacagaaaatcaataaaggaacattgatcttaatctgtagtatagaccaaatggacttgatatttataaaacatttcatccagtgggaacacaatacacattctcctcctcagcacatagattattctcaaggacaggtaatatcttaggacattaaaaagtcttaaattcaaaaaatagtcatatcaagtatattctctgaccacaatggaataaaactaataatcaataagaggaatgttggaaactatacacacacatggaaattaaacaatacgttcctgaatgatcagtggatcartgaataagaaagaagttaagaaatattatgagtcaaatgaaaatagaaacacaacataccaaagtggatggaatcaagcaaaagcagtactaagagggaattttatagcaataaactcctacagcaaaaaggtagaaaaacatcaaacaaacaacataatgatgcatctgaaagaactagaaaaacaagggcaaaccaaacccaaattatgcaaagaaataataaagatcagagcagaaataaatgaaatttataaaacaatacaaaagatcgattaaatgaaaagttggttttttgaaaggataactgacaaacagttagccagaccaagacgaaaagagatgactcaaacaaataaaatcagagatgaaaaaagagacattgcaactgataccacagaaattagaaggatccttagagactactatgagcagctatatgtcaataaattgcaaaacctagagaaaatagataaactctagacatatacaacttaccaagaytgagccatgaggaaatccaaaacttgaatagatcaataacaagtaataagatcaaagtcatagtaaaaagcttctcagcaaagaaaagcccaggacctgatggtttcactattgaattttaccaaacatttaaagaagaactaataccaattttactcaaactattctgcaaaatagaggagcaaagaatacttccaaacttattatatgaggccagtattgcccttatatcaaaaccagacaaagacacatcaaaaaaaggaaaagtacaggccaatatccctaatgaacatggttgcaaaaatcttcaacagaatactagcaacaacacattaaaaagatcatttatcatggccaagtgggatttatcccagggatgcaaggatggttcaacatatgcaaatcaatcaatgtgatacatcatatcagaatgaagaaaaaaattatcatttccattaatgctgaaaaaagtatttgataaaattcagcatcctttcataattaaaaaccctcataaaacggagtatagaaggaacatacctcaacacaataaatgccatataaaacagacccacagctagtaacatactgaatgggcaaaaactgaaagcctttcctctaagatctggaacatgataaggaagcccactttcaccactgttattcaatataggactggaagtgctagctagagcaatcagacaaaagaaagaaagaaggaacatccaaattggacaggaagtcaaattatccttccttgcagactatatgatcttatatttggaaaaacctaaagactccaccaaaaaaaacctattagaactgatacataaattcaataaaatttcaggatacaaaatgaacaaacaaaaaaatggtagcatttctatatgccaacaatgaacaatctgaaaaagaaatcaagaaaataatcccatttacaatagctacaaataaaatacctaggaataaacttaatcaaataagtgaaagagctctacaatgaaactataaaatactgatcaaaaaattgaggacacaaaaaattaaaagacatttcatgtttgtggattagaagaatattgttaaaatgcccatactaccaaaagtgatccacagattcagtgcaattcctataaaaataccaacgatgttcttcaaaaaaatagaaaagaaataattctgacatttatatgacatcacaaaagacccagaatagccaaagctatcttgagcaaaaaacaaaactggaggaatcatattacctgacttcaaatcatactacagagctataataaccaatacagcatggtgctgccatgaaaacagacacctaaaccaatggaacagaatagagaacccagaaattaataaaataagaataaatagagactagaaaaacaatagagaagaacaaaatgaagagttgcttttttgaaaagatagactaaattgataaacctttrgacaagaaaaaagagaagattcaaagattcaaaatcagagatgagaaaggaaacattacaactgacactacagaaatacaaaggatcatattagactattatgaacaatgatacaccaacaaattggatagcctagaagaaacaggtaagtttctggaaacacacaccctacccaagattaaatcatgaagaaatagaaattccaaacaaactaggkgattgaatcaataatatacagtcccccagcaaagaaaagcccaggagctgacagctttgctgctgaattctaccaaaaatttaaagtaaaactgatatcgcaccttttctaactctctcccaaaaaaattgaaaaggagggactacttccaaattcattttacaaggtcagcattcccctaataccaaagccagagaaggacacaacaacacaggtcaacattcctgatgaacatagatacaaagatgctcaaaaaaccctaacaaatcaaacttaacagcacagtttaaaagaccatttaccatgatcatgtgggattcatcccaagggtgcaaagatggttcaacatacacaaatcaataaatgtagtacatcactttaaaagaatgaggaacaaaaactatatatttcaataaatgcaaaaaaatgatttgacaaaattcaatatccttttacgatttaaaaaaccctcaacaaattaggtataaagaaatgtaacccaatacaataraggccatatgtggtaaactcacagctaaattcatgttcaacggagaaaagttgaaagttttttctctaagatgtggaataagacaagggtaactctcaccacttctattcaacatagtacataaagtcctagccagagcaatttggcaagagaaagaaagaaaaggcattcaaattggaarcaaaaacattaaattttccttgtttgcatatgacatcctgtatacagaaaaccctgaagactctactgaaaactgttagaataaactggttcagtaaagttgcaggatataaaacaaaatacaaaaatcagtagcatttctatatattaactgcaagctatctgaaaaaaagtaaataataatcctatttataatagctacaaaaaatacttaggaatttaaccaaagagatgaaaagtatctacaatgaaaagtataaaatattgatgaaagaaattggagttgcaaaagaatgggaagatattctatgttcatggattggaagaattaatactgttaaaatgtttaatactacatgaagcaatctacagattcaactcatttgctaccaaaatatcaatgatacattttttatagtgatgggatctcgctctgttgaccaggctagtcttgaactcctggcctcaagcaatcctccaatctcagccttccaaagtgctacgatcacagccgtgagccaccacacccagctatcaatgatatttttcacaggatagaaaaaacaatcctaaaagtcatcaatcaaaaaagacctagaatggccaaagcaatcctgagcaaaaagaacaaatctggagacatcacactatctgacttctaaatatactacaaggctattagtaaccaaaacaacatgctattggcatataaagaaagaccaatggaatagaacagaacccagaaataaatccacacgtttatagccaactgattttcaacaaaggtgtcaagcacacccaatgggaaaaggtcagtccattaataaattgtgttaggaaaactggctatccacatgcagaagagtaaaattaagactttatctcacaccgtatacaaaaatcaactcaaaatggattaaatacttaattgtaatacctaaagcaatgaggtcttacatagaagaaaagcttcatgacatatgtctgggcaataattttctggatatgaacccaaaagcacaggcaacaaaagcaaaaatagacaaatgggattacatcaaactaaaatgcttctgcacagtgaagaaaaccagcaacaaagtgaagagacaacctacagaatgggaaaatgtatttgtaaaccatatgtctaataaagattattaaaatataagaaaatcaaacaactcaatagcaagataataacccaatttaaaaatgaagaaaaggcctaaatagacaaaagacaaatggccaacaaatatatgaaaaaaaatgctcagtatcactaatcatcaaggacatgcaaattaaaaccacattgagatataatctcacacctgttagaatggctattatcaaaagatgaaagataaatattggtgggaatatagagaaaagggaacacttgcacattgctggtagaaatgtaagttagtacagccatcgtataggaatccatatggaggtgcctcaaaaaattaaaaatagaattgccattgatctagtagcaatctatataccactactgagtgtatatacaaaggaaatgaaataagtatatcaaagagatatctgaactgccatattcgttgcagcattattcccaatagccaagatatggaatctgcctcagtgtctggatttaaaatgatgtgacatatatgccattaaaaaggcaattctgtcattggtgacaagatggataaacctagaggacattatgttaagtgaaataatccaggcactgaaagacaaatactgcatgatctcacttctaattgtagatgtggaatctacagaagttgatctcacaagaggaataagttcaagagatctattacacaatactgtgactataattaataaaatatattcttgaaaaattccaagtgaacattaagtgtttgtaccacaaaaatgataactatgtaagatcatgcatatgttaattagctagatttattaacatcacagtgtacatacactttaatgcatgtgttctagagatgcttcagatactatctgtctgtgtgtgtccgagttcctgaaacccataaagggagaacattataaatgattccagttttgaaattttatactttttaatttctgttatccatgtgcctttcattatgtcatcatctttatccatctaaacagacattccagcatgacaggagaaatataaggtatggaattaaaacattaataaattttctctaaaatcacaggtctatgtacagcaaagatgatcatctatgagatcacattattctggggaaatgttaaaattaggattaggaaaatcaaaatggcatatgaatagtgggaagtgtggactttggaatccaattgacgtgtatactaattcctgtgccccatgcrccatccatatgctttggagggtaaattacctaaacttgctaaactgtcactcctcaacagtaaagcaaggataattatgcctgcaggagggatcttgtgagcctgaaaagactatgctgaagtgcctaacgcccagtatttaatagataacggtaattaaccttttacttttccttgatgagtctcgatcttcagttatggcagtgtcattgttcatgaaaacttgtctctaccaattccttgttttaaatgggaatacactgtgctgggtgccataaggatactaaagagttattaagatgtagtccctgctattagggggcttctaatctacctaagggcattataatttaaagggtaacatatatttattagtttaacgagagagatgcctataataaagaagggctaatcaaccagttcagggtaggagaaatatatctgaggcaattgtgatcaaataagaatttagaatgtaaataattgtaatggcacataataaagtaatgcagttgagtaaagtcctcacttaatgttgtggtggataggttcttggaaactgcaagtttaagcaaaacaacatgctatataacaaaactaattttaccatagactaattgatataaagaagagttaaattcttatagcatacagtatgtcatttcacttaaagttccagttttcacaaacctgttgatataaagtgaggtcttactgtcacctcttgtgatgtgtgtatataatgccttcttgggcacattggctgtctgaatcattcctcatcatwgctactcacacagaaagttaaaaaagaattcaatcccagcatgaaccttgtcataaattctattacaacttattatttcaatttgtttccatgtgaccttagattttaatattataggctgaaactctatctgaaatgatcaattatcactttctctaattcttttgaagtgttaaatgcaaattacgatctaattcaccatctctctccaacatcttttaaaatgattgtgggtcctcaacagttttgttttgtttttaaagccatgggcctctcttatcaaacagatctccaacttgacatttcttaaacattccttccctagatttttattggtgagatatccatgtatttcataaaatcaacaagagaatccctgattgctcaggagaaaacaattctgaccggagaatgctgttacctgaaccccttacttcgaaggatcataagattcacaggtgagtacaagatggtgctgaactaagctctcacataaaagtaaaattactaaaggcaaacacttggtaaaataaactatggaagtatcaacattaaaagcaagggctgctttggggattttcctgatcctactgccacatcaaatttttgactctcgaaatggtacttcttaaattgtcttatgaatgatttcaactgattttccccccacatagcagttatctgagattcccctggacgtatgttttaatattggctggatattgctatataccttttagcagagtcaggcaaggggttggggtgggggagcatcaggggacgccaataaaataaatttagaaatagtcaaatttcctgacagacttcccatccagtaattttgttatgcagggaatttaacaaagagtgggaaatctcagccatcaggttcttgaaaataatgccttttcaaagttggaaaacaaatacttttattagtgttcatgatagggaataatgaaggcatattctacatccctccttctaggacttttatgaaaattcctgaggtgctagtgattaataattatagatatgggaataaatgtgtatgggtacaggtaagaatagagatcttacaaagttcctacacattaagtactctataaatgataactattacagtattctaatgagatcctacaaatacctcctgaccagatttttaagggagccatgataccatttaaaacaagagaactgacaactgagaaagtgagggtcagaatacagcatgctgtcaagccttttggtaatccttaatctttttttcctgttgtaggaaatgattgaatttcttcaagtaataagcaaataccacatcaaaatcaaatatgcaataacttgtctggttggagtggaaatgaaagaaatagtgcagtgggaaacctaagaaaatctaatttaaaagaagtaacccttaacattaaaatagtctcaggcatttgatgttatttgcagaataaaagtttttgcagattatgcaagtttgcaattggcttacagggtataccctgatcaatatgatgccactactatctagttcactcattccaaacaatggctccttccaaagatgtccagagtttgatcacttcccagaggggcaagataagagatcatcaaggggaaatgaggagagaagagaatatttatgatacagaacactgaactagacattttacagaaattatttcttttaatctacccaaaaccctgtaaggtattttattttattttttagacagagtcttgctctctccccaggctggagtgcagtggcacgacctcggctcactgcaacctccgtctgccaggttcaagcgattctcctgtctcagcctcctgagtaggtgggattataggtgcctgtccctaagactggataatttttgcatttttagtagagacgaggttccaccatcttggccaagctggtcttggactcctgacctcaggtgatccacctgcctcagcctcccaaagtgctgggattacagacatgagccactgtgcccggcccctgtaacgtatttcatagtcctagttgtacatatgaagaatcttgacaggaaatggggtaaagtaacttttccccaggagtaacgcatgcacacacacgtacataatttgattcagggaagattttatgactactgtccgatctatttcctgtatatataattaaagcaagttatttaaagcagagatttattgcaattaaattggaataccttttaaagtcagttatttcccttggcaaagataaattataccttttgtgacccacccacttggagcagggtccaaggaataaaaattttgactggcacttgtcatttatatagacctttatgcattggtagcacaagtctctgtttattgagggatgccagaagatcaccaccatccaggaaccagtcctctagattgtctgttgtggtatccaaaactcccacttgagacaccacattggagagaggcatggttcagaaagaccacygttaaagtagaaatttgtcacgctggaggagcatcaaattcccatttataatcaatgacacattagtccgtttgggtctgtcataagctaatagagatctggaccttgggaggataagccagcgacattcaaataaggtgagttagagttcagcatcatgagattctgcttctaaggaagggatgctagagcagagagatagccaaaagataacatttaaactttggagaattagaggaaacagcattgaaaggcaaaggggattgctgggtttagtaaaaaaataaaaaaataaaaaaaaagcacttccttcacgctttccctcttttgttttttatgactctaggatccacccagttgctcaagtaaaaaacctgagagacaccttacgccatctgggaacttgttagaaattcttaaacctcattctatacctgctaaatcagaaaatgtagggattaagtctgattatttgtgttttcgcaagtcatccaggtgattctgatgcatggaaagtttgagaaccactggtttaggttattaaaagttcttgtctccctatatcttgttttgcaatatcattgcattcaccccagccccacaaagctaccatctattgaccgttttgtagctattgagctttttgaagcaaaaatatgagcaagtcaattctctgcttaaaacctttcaatagatttctagtgtccttaacatagcctacagagcccttcacaatctgaggtcctcacatgtctccagcctcatcccgagccactcccttgtgaggccctctcccatcatgctaaacggcttcacatggcctccaaaggaaagtgtgacaccttgcctcagtacctgcacatgtgctgctccttcagcctagaatattctattgctaccccttcactttacaagctggccaaaccctactcatcttcagaatgctgtttagacattacctgtttaccaatcccatcaactagttgcctcgtcttctaggcctccactgagccttgcacctacatctgttataggcacttctcatattactataattacttaaatctgttactcctattaatttatgatcgcttggagaacagaagttgtatctttttcattccatgtcaacagcatacttcaaagtacctggtacataggttgccaaaaaatgatttttgagagttgatatggtttggctttgtgtctctacccaaatctcatcttgaattgtactcccataattcccacatgttgtgagagggacctggtaggagataacttgaatcctgggggtggttcccccatactgttctcatggtagtgaataagtctcaaaatatctgatggttttatcaggggtttctgcttttgcgtcttcctcattttctctctttgcccactgccatctatgtatgatatgacttgctcctccttgccttctgccatgattgtgaggcttccccagccacatggaactgtgagttcttcattaaacctctttgctttgtaaatcgcccaacctcaggtatgtctttattagggtgaatgaaaagcaaagataaactttgttaaatcatggatttgcctaaaactagtttcataaaagctgattcttaagtattcatttgccttctgtttaattaactttattaccactttcagcttagtcctaggaaattaaagtgcataaatgaggtaatttctaagagaaagccagagaagtctgttctgacttttcctgtaggaggggtgaaggaatgcatctattaatcttgagaagggtaacttactctgagtatatgtgaatttttttcacaagaaagggtactacttacaataaagactctttaaatggaaatgttttctttggaaaaaattagagtaaaataagggagtaatcaaaatatattagaaaaacttattttgaagagcttaaccgtcttttttctagccccaaagctaccaaaatacatactacgcaattgacattggaaaatgacaactgtttccactagccattctaatgaacctgaaatggcatgaattttctcttgcagtttatgtaattattccacaatctactacaaatagtattttccaagaaatatcatcagctccacattgcaaaaaaggccagtgaattcatttttaagaaaataaggctttatgctgtaaaagatgaaaaaacgtgagattctaatacaattctggttaaattgatatttaaccctttctgcattgcaatttgacagtgtatttcaataaccttacaaataatggtctttttttaaccccaaattccactgcaaataatccattctaatgaaacaatcagaaatgtagattaatttttgtggactaaaattattttttaagttagatatctctaatttttttwaaaaaatgaggccattataagttgcaacctcagaaaatggtattaagaatttttcatggagaatattcatgatatgtgaaaagttaaaacactatgaatccgatcctttcctgatccgggagccaagatggccgaataggaacagctccagtctacagctctcagcgtgagtgacgcagaagatgggtgatttctgcatttccatctgaggtacctggttcatctcactagggagtgccagacagtgggcgcaggacagtgggtgcagcgcaccaagcgcgagccaaagtagggcgaggcattgcytcactcgggaagtgcaaggggtcagggagttccctttcctagtcaaagaaaggggtgaaagacggcacctggaaaatcgggtcactcccaccctaatactgcgcttttccgacaacaggcttaaaaaacagcgcaccaggagattatatccctcacatggctcggagggtcctacgcccatggagtctccctgattgctagcacagcagtctgagatcaaactgcaaggtggcagcaaggctgggggaggggcgcccgccattgcccaggcttgcttaggtaaacaaagcagccgggaagctcgaactgggtggagcccaccacagctcacagaggcctgcctgcctctgtaggctccacctctgggggcagggcacagacaaacaaaaagacagcggtaacctctgcagacttaaatgtccctgtctgacagctttgaaaagagcagtggttctcccagcacgcagctggagatctgagaatgggcagactgcctcctcaagtgggtccctgacccctgacccccgagcagcctaactgggaggcacccgccagtaggggcagactgacacctcacacggccgggtactcctctgagacaaaacttccagaggaatgatcagacagcagcattcgcagtttacgaaaatccgctgttctgcagccactgctgctggtacccaggcaaacagggtctggagtggacctctagcaaactccaacagacccgcagctgagggtcctgtctgttagaaggaaaactaacaaacagaaaggacatccacaccaaaaacccatctgtacatcaccatcatcaaagaccaaaggtagataaaacsacaaagatggggaaaaaacagaacagaaaaactggaaattctaaaaagcagagcacctctcctcctccaaaggaacacagctcctcaccagcaacagaacaaagctggatggagaatgactttgacgagttgagagaagaaggcttcagacratcaaactactctgagctacaggaggaaattcaaatcaaaggcaaagaagttgaaaactttgaaaaaaatgtagacgaatatataactagaataaccaatacagagaagtgcttaaaggagctgatggagctgcaagccaaggctcgagaactacgtgaagaatgcagaagcctcaggagccgacgcaatcaactggaagaaagggtatcagcaatggaaaatgaaatgaatgaaatgaagtgagaaggaaaatttagagaaaaaagaataaaaagaaatgaacaaagcctccaagaaatatgggactatgtgaaaagaccaaatctacctctgattggtgtacctgaaagtgatggggagaatggaaccaagttggaaaacactctgcaggatattatccaggagaacttccccaatctagcaaggcaggccaacattcaaattcaggaaatacagagaatgccacaaacatactcctcgagaagagcaactccaagacacataattgtcagattcaccaaagttgaaatgaagaaaaaaatgttaagggcagccagagagaatggtcgggtaacccacaaagggaagcccatcagactaacagcggatctcttggcagaaactctgcaagccagaagagagttgggcggggcggggggggccaatattcaacattcttaaagaaaagaattttcaacccagaatttcatatccagccaaactaagcttcataagtgaaggagaaataaaatcctttacagacaagcaaatgctgagagattttgtcaccaccaggcctgccctaaaagagctcctgtaggaagcactaaacatggaaaggaacaaccagtaccagccactgcaaaatcatgccaaattgtaaagaccatcgaggctaggaagaaactgcatcaactaacgagcaaaataaccagctaacatcataatgacaggatcaaattcacacataacaatattaactttaaatgtaaatggactaaatkctccaattaaaagacacagactggcaaattggatagagtcaagacccatcagtgtgctgtattcaggaaacccatctcatgtgcagagacacacataggctcaaaataaaaggatggaggaagatctaccaagcaaatggaaaacaaaaaaaggcaggggttgcaatcctagtctctgataaaacagactgtaaaccaacaaagatcaaaagagacaaaaarggccattacataatggtaaagggatcaattcaacaagaagagctaactatcctaaatatatatgcacccaatacaggaccacccagattcataaagcaagtcctgagtgacctacaaggagacttagactcccacacaataataatgggagactttaacaccccactgtcaacattagacagatcaacgagacagaaagttaacaaggatacccaggaattgaactcagctctgcaccaagcagacctaatagacatctacagaactctccaccccaaatcaacagaatatacatttttttcagccccacaccacacctattccaaaattgaccacatagttggaagtaaagctctcctcagcaaatgtaaaagatcagaaattataacaaactgtctctcagaccacagtgcaatcaaactagaactcaggattaagaaactcactaaaaaccactcaactacatggaaactgaacaacctgctcctgaatgactactgggtacataacgaaatgaaggcagaaataaagatgttctttgaaaccaacgagaacaaagacacaacataccagaatctctgggacacactcaaagtagtgtgtagagggaaatttatagcactaaatgcccacaagagaaagcaggaaagatccaaaattgacaccctaacatcacaattaaaagaactagaaaagcaagagcaaacacattcaaaagctagcagaaggcaagaaataactaaaatcagagcagaactgaaggaaacagagacacaaaaaacccttcaaaaaattaatgaatccaggagctgattttttgaaaggatcaacaaaattgatagaccgctagcaagactaataaagaagaaaagagaagaatcaaatagatgcaataaaaaatgataaaggggatatcaccaccgatcccacagaaatacaaactatcatcagagaatactacaaacacctctatgcaaataaactagaaaatctagaagaaatggataaattcctcgacacatacaccctcccaaractaaaccaggaagaagttgaatctctgaatagaccaataacaggctctgaaattgtggcaataatcaatagcttaccaaccaaaaagagtccaggaccagatggattcacagccgaattctaccagaggtacaaggaggaactggtatcattccttctgaaactattccaatcaatagaaaaagagggaatcctccctaactcattttatgaggccagcatcatcctgataccaaagcctggcacagacacaacaaaaaaagagaattttagaccaatatccttgatgaacattgatgcaaaaatcctcaataaaatactggcaaaccgaatccagcwgcacatcaaaaagcttatccaccatgatcaagtgggcttcatccctgggatgcaaggctggttcagtatacacaaatcaataaatgtaatctagcatataaacagaaccaaagacaaaaaccacatgattatctcaatagatgcagaaaaggcctttgacaaaattcaacaaccttcatgctaaaaactctcaataaattaggtattgatgggacgtatctcaaaataataagagctatctatgacaaacccacagccaatatcatactgaatgggcaaaaactggaagcattccctttgaaaactggcacaagacagggattccctgtctactactcctattcgacatagtgttggaagttctggccagggcaattaggcaggagaaggaaataaagggtattcaattaggaaaagaggaagtcaaattgtccctgtttgcagatgacatgattgtatatctcaaaaaccccattgtgtcagcccaaaatctccttaagctgataagcaacttcagcaaagtctcaggatacaaaatcaatgtacaaaaatcacaagcattcttatacaccaataacagacaaacagagagccaaatcatgagtgaactcccattcacaattgcttcaaagagaataaaatacctaggaatccaacttacaagggacgtgaaggacctcttcaaggagaactacaaaccgctgctcaakgaaataaaagaggatacaaacaaatggaagaacattccatgctcatgggtaggaagaatcaatatcgtgaaaatggccatactgcccaaggtaatttatagattcaatgccatctccatcaagctaccaatgactttcttcacagaattggaaaaaactactttaaagttcatatggaaccaaaaaagagcccacatcaccaattcaatcctaagccaaaagaacaaagctggaggcatcacactacctgacttcaaactatactacaaggctacagtaaccaaaacagcatggtactggtaccaaaacagagatatagatcaatggaacagaacagagccctcagaaataacgccacatatctacaactatctgatctttgacaaacctgagaaaaacaagcaatggggaaaggaatccctatttaataaatggtgctgggaaaactggctagccatatgtagaaagctgaaactggatcccttccttacaccttatacgaaaattaattcaagatggattaaagacttaaacgttagacctaaaaccataaaaaccctagaagaaaacctaggcattaccattcaggacataggcatgggcaaggacttcatgtctaaaacaccaaaagcaatggcaacaaaagccaaaattgacaaatgggatctaattaaactaaagagcttctgcacagcaaaagaaactaccatcagagtgaacaggcaacctataaaatgggagaaaattttcacaacctactcatctgacaaagggctaatatccagaatctacaatgaactcaaacaaatttacaagaaaaaaacaaccccatcaaaaagtaggcgaaggacatgaacagacacttctcaaaagaagacatttatgcagccaaaaaacacatgaaaaaatgctcaccatcactggccatcagagaaatgcaaatcaaaaccacaatgagataccatctcacaccagttagaatggcaatcattaaaaagtcaggaaacaacaggtgctggagaggatgtgcagaaataggaacacttttacactgttggtgggactgtaaactagttcaaccattgtggaagtcagtgtggcaattcctcagggatctagtactagaaataccatttgatccagccatcccattactgggtatatacccaaaggactataaatcatgctgctataaagacacatgcacatgtatgtttattgcggcactattcacaatagcaaagacttggaaccaacacaaatgtccaacagtgatccactggataacgaaaatgtggcacatatacaccatggaatactatgcagccataaaaaatgagttcatgtcctttgtagggacatggatgaaattggaaatcatcattctcagtaaactgtcgcaagaacaaaaaaccaaacaccgtatattttcactcataggtgggaattgaacaatgagaacacatggacacaggaaggggaacatcacactctggggactgttgtggggtgggtggagcggggagggatagcattaggagatatacctaatgctaaatgacgagttaatgggtgcggcacaccagcatgtcacatgtatacatatgtaactaacctgcacattgtgcacatgtaccctaaaacttaaagtataataataataaaataaaatttaaaaaaacactatgaatccataattgtttttaaataaaaagaatgcaacattatataagtgtatatgtgtatttgtgtgttatccatagcaaagagactgaagggaaacacactaaaaattagctgttgtcacttctgaattgtaggataatgggcaaattgggcaaataatttttggctttctaatgttccataattttaattttttatcatgaatatgtttacttttagaaatcagaaaaagaactaaagataatttttttaaagagtgagggcagaataaaggctatccagaacgatggccaagttctctaacagtcttcagtgtggatagaagagcaaaaacttcaacttgcttctctaattcttttgtctcctctcgtctgtgtggcatggatttgaaggataggcttctgcttcaccccacagatccaaattaagttttaaatgagacaatgacaagaatagtgacatcaaagagaaaacattcaaattcaaccatctcctcctttagcaaatgctaatggtgttgactttgacggagagtattaaattcctttgattcacaaatccaacaatacatttttccccccaaccttctcattataagaaagctgcctgtcctcccagrctttaagcataaaacatcatagctaaacttctctatccacttctaaaccattgtatagtttctcaagttatatttatataatgtgcaaagggaggaaaggaactggctaaactaacaaattttacctgtactttataaaaacaaatgtaatcaaattagtaacatgtattaagactcctctctctcattttttccctcttcatttcttttactttataccatttcctttgctactacattacattgtgtagtaacagcaacacagatttatgttctcaagagagttaaacacccacctttctttttcagtggcaatgactaagtaaggaagttacaytttccaaaaaaaatgtgaagttcagttcagttctgctcacaaatatacttgagtaaatatttttgtaaatataaattattaaayagtaactttttaatactgaaaagtaatgaatagacagcattagaatttgatgagggtttttggtttgtttaccatatagaaggaaaaccaaattaactttcccttcctgaatagttgctttgagttaattaaaaaactgatccaaatatgcaaacattagactattagcactaaaatagcttgtcatccagagctcttcattatagtcttttcatttggggtcacacagttgatccattattacttctaataaaaatttaattaaataccagccaagtcttctgccatttaggtccggtccgaggattaggtagcactggacagactaaaaagtgccatggtaaacagcgaattcatgtaacgctaattaatttccataaatcaagtgtggtctaagtgaagcatgaatattttaaatgcagtttcaaaggtcatggcgttttatggttttaagaattgataccctgggacgagcttaatgtcagcctttttgagaactagaaaatcctcgattttgaaagtcatttaaatgtactttatcagaaaaagactttatttgattcaattagtctatttctgtttgcattcagtatttatagttaaaatacagctggggggccggtcatgttcattcaaccttcaatgaaatagtcattgagcacctactagatgctaggtacagattaaggtgtttagaatctatgagtgaaccaaatagaaatgtgccctcattcagtttatagtctgatagaaaaagccagacactaaacaaaataaattataatgttagaagataagtagtacagagaaaaatagggaaaggaaatagggagtttgtggcagcagatatgtaattttaaatggagaggagaagctgtataccatgagaattgttgagttggcagtgaattcatagcaggacagagcaatcaagacagggatgatcccagggaaacagatgcccagggaaccaggccagctccatgtgctgaccgagaagttcaatctacccaggtagtctaaagataagtgacagtgcccaggcacccaactttctttctgagccatgagtstagatcataaaagaaaaatgtcaagagcaaggcaggacatgggcctataagcagatggagataatttctagaattcagcaacaggaaccgtagttgaagctcaggtacacaggttaagaggaaagagccaggaagaatcttcagggaacaaaatggaacccctgtttctggaccacttaagcagccaaggcactagattagagactaagatgtttgctgcttcctactagggatcaggaytgggcttgtggctgggattcaaggatgcaggggaggaaggatgctgaagctggtaccatgactggcctagaaggygtagccagggagcaacctttgcttgggtctcaagaaattgtgatgaggttacttttggttcctctgctcagtgcagggactgaatctattcccctttgawtgtcatccttggtgagccagaatattacagatctgaccaagactcctaccctagaactccctagattaccctaattatcaagaggaaagttattgagtcatatgagactagtgattcttttctgtgggtcctccttagctctagtgttgagaggctggactccaataaaggactgagcagaagactgctttctgtagcactttgcaggttagacaatgcaaattcatgacactacagtgaacttaattgctgtaaaacagtgtttcttaccctcagcactctcgacattctctgccagataattctttttttgtgtagaagtagaatactgacttgtgtgcattgtattaatacaatgtttagtagtacccctggcctctatccaacaaatgccaatagcactcactcctcyagtagtgacaatcaaaaatgtctccaaacattacaaaagttccctggggcagggtcaccctcagctgacaactacttttgtaaaggtttttttaagtatatttcaaagacttttaagaagttatacaatatcttgcataacaaaaatattcatataacaaaastaggcactaactgatgactcaacagttagtaaagtgtagtttcaaagctttctataataatttttaaaaagtagtgtgtgttttggaagcaacttacttatttttattttctgagacagggtcttactctgtcacccaggctggagtgcagtaacatgaccacagctcactgcagccttgacctcccaggctcaagcaatcctcccacctcagtctcctgagtagccgggagcacaggcacacaccaccacacccagctaattttaaattattattatttgcagagacagggtctccctatgttgccgaggttggtctcgaacttaagggatcctccagcctcagccttccagagtgttgatattataggtgtgagcagaaactatttaagttattacattagaacataatgaaattgtttaggaaatgcatcaagcagagggcaacagtgccagatctcagtatctgtaaatcaccaacagggctgggagctgcccatgggggcttgatgctgatcttgtggtaggaatgggagtagattcagatcatcagcttcagctttagaaacttacaaacatggaatcacaaaagccgaatttgaagccttctaaaaatccaggcctcaatattcctatatttcgatatctcttggtagctacatttttttctccacatttagtttgtatccagggcatattttctagacttacttgcatccacaggttccattccactttaaagttaccatagcctctggcaaacttttatgttttcctctgtattaagcagcatttggcattataccgcctagagggaccgagaagatatttagaggctaggtggcaagagagaaggctcatatttgtgagataaagcactggggaattgtcctgtcaaaggagtaaagaggacattcttgagataaaatcctgttaagaagcagagtaattttatgctttgaggaagtaaaaatgtatttgtttgttcttttgtttataaaaatatttggtgggctttctagttgattactcatcatctttattaagtaattatccttcatcttcacttatcatgagtaattacaatgacaaatacagggtatttttttctaaaccaccagcttatcgcattgtaaaaggtgctttattaatacaaaggatgaataactgagtcaaatatttgtttcaggttgttacaattgtaggtttcttatatctttcctgcatttaaaaaataattttataatcaatttataaccacttcccttagttacatctacttctctcagttataagagcaatatcaataaagggctcacaattgacaaagtgtttttacaactgttttttatgatttgaataatcaccctgtgatacaaggcatacttataattcattttaacagataaagtgactaggttcagattaattgactttaataaaatcttttcttatgatttcaaccatctgatcaagacaagcaggctattgtcagcctttggtgtttgtgcagtatcgataggagaaagactacagcattgctctgtaaacacctaaaatttactatccaaggaactgatgtattcaattttgccagaaacttatttttgaagcacaatatatagggcatatggatcaattgcaccgaatgtgtttgtcatactagaaaaaagtcagattcattgctaaagtgatgagaaaagtgccttattcaaatgatgacatatcatagatattcaatcatcttctttttggaaaattgactacaaaattgaagaattcgtattctgttgtggcaagtgaaatacatttcaygagggacatgttataaagtccttgcctcttctcagtgctgtgtgcatgtgtgtgtgctcccaagcataagctaagatatctttatggtctgatgcttatccatatgtatgttaataataaataagcttagacaattatgattaagaatatagcctctggagccttactattckgtttgtaacccaagctcctctactcactagctgtatgaccttggtcaagttaattgacttctctggatctcaatttcctcacctgtaaaatgtagggataatagtgtctacctcaaagtcatggtgagcattaggtgaactaatattgcaaagcacttagaacaatactttgtatgtactaagcacagcatattagctattgttattattacctggtatccatggcagtcatagttaaacatctcatcaggtcagtacacctttataaggaaatgggatgaacatggtaacctcagataaattatcttcataggaaacttccagtttgaataaagcatgttaatgagaaagcattttaccacttttcctaaagaaactgtggtttcctgaaggaatggtcttcaatagttgaattgaggtaccttggcaaaaatggaattagatagagattttctactggggatcctgatgtggaaaagaaaaagcaaaagtaaactgtaygtgtttctttaatcttgtgttccatttccaatggaagttggtggttgaatcagaatgtggttggggaaacagtgttaagaattccttaggtattcctcttacagtgttgaaatggcactggtaaacccctgccatttgcttgtacttttctgtgtgggataagatttttttatcattttttctaccaaaacagaggccagaagctaatgggagggcacgttttctcattttgtggacatcacggtagaaaagctaccacaaagagatgcacaaagctggttagattttgaaaacgagaaaatgttcaagtatcctcaatatcatacaacatgctactactttcactatctttcacgacatcgttttaccatagagaaacaaaagaacagtcctctttttaacagtttatttttgttgttattttgtttttgttttttgagacagagtctcgctctgttgcccaggctggagtgcagtggcacaatctcagctcactgcaacctccgcctcccacgttcaagcgattctcctgcctcagcctcctgagtagctgggattacaggcacccagcaccaccggctaatttttgtatttttagtaaggacagggttttatcatgctggccaggctggtctcaaactcctggccttaagtgatccacccacctctgcctcccaaagtgctgggattacggggacaagccactctgcccacaggtttttttgtttggtttggtttgttgctgttgtttgagaaggagttttactcttgttgcccaggctggagtgcaatggcacaatctctgctcactgcaacctctgcctcccaggttcaagtgattctcctgtctcagcctcctgagtagctgggattacaggcatgcatcaccatacctggctaattttacatttttagtagagacaggatttcaccctattggtcaggctggtcttgaactcctgagctcaggtgatccgcctgcctcggcctcccaaagtgctgagattacagcatgagccactgtgcctggccaacaatttttgataagagattgagaacgaatgttaaggaaagtagggaggggtggtaaaagctgcggttcagactaagcaactgcccacagagtagcttttcaacatagatgcagagtactgttggcaatttaatccagataaattgtttttatgtctttttcactattcttttcttttttaaagttccatgtgttagtttccccacatgaaaatgtatagaagtttttatgtgcccacgtgttaatactgaaactgacaaccattgtaatttctcagaatcagaaatagggacatttctaagatatgcatgtttcaataaaactacccatcaatacttcccaagttcatcatgacttgagtttcttgtgcttcacaaacatctccaataaaaagtatttgttgtgtatgacatagatctccatactctaaggttttttttattctcactgcattagaatagagagtgctttgatttgtgaattatgatttacagttttccaattcatgagacacttataaagtcccagtttttaatgatcacttattttctagttgcctagcactatgcccgactttgtgaattttataaaaaggagatatgatccctgcaacatacatgctaaatggctttttgtcaactatgttctctgaaatcagggatgcaaagcaccaacatgaattagaaaatatggacaagtttctatgctcttttatcctcttctgttaatctctaaagtttcttcagcaattcattcattgatcccacaattatctgttaaatgtttactatgtgccaagtttgatgctaggtgctgggaatacaatgatgagcaaaaacaaatgtgttccttgctgtaataaagcttccatattcaacaattctaatgtgacagatggaaattattgaataatctatgcaagtgtaaagttcctactgaaacaagaaatatgagaataatggtaccatactagtctaaaataggagatttttccaacrtccgatgtgatctgtgattatttctccctatttactcttaaatggggcaagacctatgcatgctctattcatcagcagaagtgtgacttgctcttggccaacttttcagagctacagcttgaaagcagacgtacacagccccaagtccagtccctagttagcaggcttcctactagagctcctcagctccaaggaactagcatctgctgtcctcactgtgtggctcattggtactctatagagcgtgcacaaagctgctatagccagcagcagccaygctctccagaacacgtggatctagtcctcttggaatgcgaaatgcccatgcctgtgcccctgccacctcctgttgagttcttgtccaggagtctctctgtaaatacatttaggaaaaaaaaaggtaagagaggagagtcttcagccaattcagagcgaactcatccagtggggagacagaagccttgttttctggggagtctaaatcctggatctcagagtcaggggcctgatagtatgaaagaaagaaagccttyccctagattttctcctgccgtctctgtagtctctgtcttctgaggagaagcttgagttttccatgaggtaaaagtgtgtgtgtgtstgcgtgcatgtgtgcatgcgcaagtgtgtgtatgtgtgtgagaaaaagagagagattaaacatactccatatgaaggttatcaacagtggacccctctcactcatcctcccttcagtttggtgtcatttggccaactttccatcttttttcactgtcgtcatgtatgattttagtggacaatgagagatgatccatcagaggctgtcagyaaagtgcctttttgactggagaattacacatttataatttagtatgcaacatttggccttcagttttgaggctctacccaaggtctcagactttccgggcctaaaaggaacatggtccttcctttgctcaccccacsaacctctgctaattgttactctgttgcatgcatstaggcttcctaatgaaggtctgctgtgtggacagcactgagcagtctggttctgtacttttcccagttctgaagggatcctggaatgaggcctgttattgtttgtcagtagaccaattactggtggctttgaagatctccttcatgcacgtttcctggttctgtcactgtttctactacattcttggtggagtcaagtgctggagtcctgtgctgagtccatagcaggaatagggtcacagaatttcactccatgtcctaaactactagggatcaaagatcctaacttgtccaaagacatcctatctgagatcagatggggtccaggtaaaaccctgagaaaaaagtgagagactktaacaccttcatcatcctctttcttyatcctttgtttagcccagtgtgcatcagttatgttcttttaggtcacaaagagctcaggtttccttagacaatccatgttactgggacctgatcatggccatcaccagcagacaccaattttttttgtccttccaagcctcttctcaactaatttgacccttccttggccattgctaatgcagttaccctatgctgtggtgccaagctggatgtgaaacttctctaagatgtttgtggggttcccaatctacaccccagcaggaacacgatgccctttgtccacatttacaaaaaacccttctggagatttgtatttcccagcccctgaggcttgacaccagcctgaggcggggagcctgtaagtacctctttacttctgtaatcagaacaggcagggcttcagctcctcctgtgacacccacatctgcttcctcacctgctctgcagctgatttcagaaactttgtaagactgtctcgccctccaggttgtagctcttgatcttccaaaccaagcatattcagaattctgaacacagccacagcaatcacaacaaggacatagctctggcaaataaaaagtgctttacttctggacttttgtgtctgttgtaaattggaaaatccattcagaaacataattggctttggcttctctgaagtaagaaacaacacagatggagcagagccttaagataaatagaaccatctgaggggtgtggggttacagaaatgaaaaatatctattaaaaaatatgatctcacctgaagaattttagactccaagccaagatacagagacatttttaaaacatcttcaaatcataccttgcaatactggagaccaaatggtgtttcatctgactctaagggcaaaagtagctgtttttagcttctgaggcttgtaaaaatacacacaaggagcgtagggtgaagtaasagagagatggcttgagttcctttggaaaagccctgtatgatctgacatggtctgtgagttaccagtgcaggttccaccgcgctttgttggtgtggcctgcatggggcaggtgggcttcccaggctgatgcggtacttcctgaagctggatcaaatgcaccagaatgaagtggttggacagcggatgctcctgaagccagcagaagaaacagacacaatccacagaaggcagagagaagaagagaagctactttcagccttggcatacaggacaatggtgtggagagctggccaccatacaatcgctgtgaccacagagctggcactgacccaaggaacctagaaatcctctgccaaagaaagaataaaacctgccctaattggaaacacttctgacaaaatgccaaagggagatcctgccacttttcctttttcagatcgtaaatcaccctagtttcctggaaaagttatgtctggacagacttattgccccttgaaagacccagcaacctggtctttgaaaatcttgctggaagatgtagaaaatctccaaccattcagacttccagtacctgggggtgaaaactgcctcggatgatcaatgaatgcctgctctcagaggtcagacccaatgagtatgagccagcagaagcttaagagctagttctcattatgataaagcacattctggcaaggccacaaaaagaaagatgatggcaatcagcacagatacaaatgaaaaccagacgaaggtttcagccaaactagtcttcacttctgctataatggattaatttttgggtgctgaagtcagcacaatttgcagattcagaacactgaatacgggagtcaaaattgggtagacatttagttgaaactatagcagactcttgacatttacaagggttaatgctgcctctcgcacttgtcaacttctaccttcaattgcatataatacatcttcatctcttcaacccacttatagctctacacagcctttctcagtgcatagatgtaatatacaggccttgaaataactcacagcaaagctttctgtaaggaaacctctgcatgttcaagcttgttggggctaatcctctggaatttaccagagaacaaataaaatccaggaagtatagcctactcacagggttttcagaccaacagcaaaaccagaataatgcacccttccccaccaaaggatgatcatgtccctggaaactgaatgttaccttacatggcaaaagggaatgcaggtgtggttgaagttgtgatagggagactatcctggattatccagatataatcacaagggtccttataagagacaggcaggaggctcagagtcagaggagatacaacagtgaaggcagaagttggaatgatgtgaagtgctggaaagaggccataagataaggaatgaaggcaacttctagaacacatggaaaaggaaagatgtggattataccctgagcacttagaaggaacacagccctgccaatgctttgagtttagcttagtggaacctattgtaggcttctgaattccagaatacagaagtctgaaggggatacatttgtgttgtaagcccctcggtttgtggtaatttgttatagcagcaataggaggctattggtcaacaacatttgtttttaacacttttcctttattctcattttctgtttccaacatcaaatgaaactccaattcaagcaaagtttctagaataatttttttaaaagacaattccataagatcctcctttactctcacctgccatgttgtaaataactcctcccaagatgatttacatttccaagtagaatcagggagaaggtatttcgtatagaaggagagagaactgatgttgattaattacgtagacaccatagcaagtattttgcacgtagattattctcttttccccaaactaccccctactccattttgcagcaaaggtaaccaagattcaagaaagataaataacttatactctgaatgagtcaccactgatgtgtctatatgactccaaaattcaaattattttcgttagactgtgctttttctaaactaccgatacaaaaccataaagtcctaacagtagaatgtctacatcaatttggaagaaatggtgatttgggaagcaggtaccactcctggaaagatactccggggagtacttagaatcattttgataggtcatcatggactctcaccgctgttttctcttaggagaaaaatgsaattgacagagtatgttaccattcctaatgattttaaatcttcttataggggtgtttgcatttggactttttgctactgacatttttgtaaacgccggacaagtggtcactgggcacttaacgccatacttcctgactgtgtgcaagccaaactacaccagtgcagactgcyaagcgcaccaccagtttataaacaatgggaacatttgtactggggacctggaagtgatagaaaaggctcggagatcctttccctccaaacacgctgctctgagcatttactccgccttatatgccacggtgagtgtgcaagtcttgtctctcctaagtccagtttttgataggatgtgtgtctccctgccctgtctccattctttcattgtcacttatagcgactcttaaatttatgtatggcatatttctctacattatgctattgatatactagcccccccacacacacacttctaccccactttcaatctcctgatctgccagaggatattagttctggaatgttttgataatcacctaattacatcctcccatttacagatgtgaaagcagggtcccacagtatagctaagatcatacaaccagagcagggacccagactcctggtactgtgtctgagattttcttacctcccacaacagtactctttgtcaaggttttcgttggtttcggaacagcacaccttctcacacctgcctagaaatttgcaagcatgggccttatatgaatgactgctccaacaacatgcagacccaggatacacagctttcctttgctctggcacttttctccatgactttgctaggagacagggatgatcctagaaaaacctcaacaccccagagtatgtttctcattgtcccccagatcgcacagccattgactgccccactggggtataattttctctggttttctttttgttctagtaacagaaaaaccaaagtatgtcccacatcttaaagaacaatggtgtctctcttattttccaactttttaactgtattcattttggaaataacttcatttcactcttgtctggcttatgcattcttaggacccagaatatagacatgcagagatcagctcaaaggctccacgggctgatacgatattgctggtggacatcaggtgcatttaccagtggcagagcaactgttggcccaaaacaccccctttccttacttcaacttattttatattcagaatatgactagtctggtaattctcaatggaaagtgtgggaatggaaaagacagaaggaagcctcctttcaaactgtccattcttcccaaacatctgagtatgccctcaacccaccccccagggagatgctacccttcctgtcactgagtgtaattgcaggaggcatgttctgcctctgcgggaagaaaacgggtctgtgccttcacccctagggtggaaaaaaggcaaaaactcatatgggtttcttataccccaaatgattctttaatttgtcacataaaaactgcatgttctgaatctaataattaatacacagtcattctttgtgactatgggtctgatctatttatttaaaacaaccaggagcagatagtgcctttgtgtcccatttacaggatcacatcgatagggttattttgtcaaccaccaactatgtgacatgagtatgtgaaaaaaaggacttcagctgtccccacattaaagaaacaaggatgcaaataacacagaagcctcaatttacaaaacagattatagctcagttaaatgtctttgctttatcaaaaacaaaaccaaaccaaaaaacctctatgcaggtatttttttwaaacaaataaagccctctgaagtatccaacatattttcaaattttcagaatgttgatttttcctaattatctagaacctaaacaatgtattcttgtgccttttcctgtattttttatcagactcaagtcattgctgtgtgaaattaatttttatagtaccattataaaaattattctgttacttataataaactactgtctcaacaaatgagatacgaagttctttgggcaagaaagaagtaaatatcatcagctcacacagaataaatgtgactataacatgttctcaaggattcagatgttatccaattcaaatcatgcctcacagactatagtcagataaaccctgatataagattccaattgcataaatcttctgagccgctattacatgtcaaatgctttcagaaattactcaacaaggatttcctaagtactggttaatactatgaagaataccaactaaccataggctcatgcttttaatagtttttaatctttcttataggaaagatttatgacagatataattggaaaacataatagcatgaacaactgaatatatgcagcataggttttaagtaacatttaccagagtctgaaaatagtgtaataatatgctgtaatttatgtaactgtgatgtaaccagttttatagggaatctgttatatagaagagattcctatcttctggtattctcaccagtgttgaggtatcattctagaatattaagaatttctattgtaatactgtaaaatgcgtctattttaacttatatgtgctcaggccatatacacatactatataagtatcagcatattattttttagaattgctaagctcacatagcacatttgttaagaaatgatagaccaatggtgccctctagtggtgttttgtaactactaccaaaggttagctaaaaaagtgtacttacatgaaaaaggcatggcttcctaactctaaaccaccagggacacatttgctaactgaacctgtaaaacgtcagagtcttacccagcacctcacaacaaactaataacagccgcctacatctcaggtgtcataacgtgtatcatcttttacttagctcaggtcttcttgaccttttgtatcttgtggaacacacagaaaattttaatattttaagaaacagtggagtaaatgaatgaataaagctgatcacagctgtcytgaggaatgtatgagtcaatttactagcacagctgaaacctatttatgtgatgcagttgttgggaggttctaattcagcctatcaactaactcatcagtcaacactttgttggtattaatcacctgaaggtgtgacaaagcaactaggaacttttggggacacaaaaaataaaatgtacggtcacttacagtcactctcctacctggtcttctccaccaaaagcttcattcccatagaaggtttatttggtatctcagactctcatatggatttcttataccccaaatgatatttaaacttgtcacataaaaactgcatgttctgaatctaatcgttaatgcgttctttgtgtcactaataacttctgttgacatgtccactagattacaaaagactgaagaatgtacmtctgttcattgttcttgctgcactgatttcctacctaaataatttattaaatatcttaatggagttgttcaaggaatactagttagtgtggttgctttgacacaagcccctgcttgtgtatgctggtgtatgtacctgcttgcttgcatgtgtactcatagcacaaggcrgctgcctggtcactccctggcctctgtcctattccagatgtatattacaagcacaatcaagacgaagagcagtcgactggccaagccggtgctgtgcctcggaactctctgcacagccttcctgacaggcctcaaccgggtctctgagtatcggaaccactgctcggacgtgattgctggtttcatcctgggcactgcagtggccctgtttctggtaggttgacttccctctttttaccttttccccctcttctactctctgaaaaactgtgagtcaggtttcccagacttcaccatctgtgttcctttcgtcccaaccttgtgaattacaattattctccaagtattatacatgcttttgctacaaaaatgatttcaaaacacyctttcctttcagaaactggattgccaaattccttctgggtggcagggagagaattgcccctagaagtacagctggctctacccctttcaacactgggcttgggactggggccaagcagactaatgataaattggcacaccttcaaaccaatcttctctaagtatttgttctcagcatattgggggcaaaagctaagtgttccttgagggaagaatagagaatgaagagcactggtagaagcaagcagcctcttctccagcatcccaagaaactcaactctarytccaaagttgcatctcctactcggaaattttaaaaaccctgcagatgatcacaccygccctttttagtgggcctctgttactattggaacatgcctcttgggaatcttacttccrctaaactggcttctcaaccacctatcttcctggagaagagttttggttaatacatttttcttgtatttctgattatgttttagttccccaaatagatggaggtctggccacctgctcacctaggaaatcccttaaattgagttggagttgataaaaagaggttaatttttattctttttgccttctctttcacggttgtattgaagtataataggtatacaataaatgacacatcaagtatacaatttgatcaattttggcatacaactttctcacccttccttttcccttatccccaggcaactggtgatcttctgtcattctatattagtttgccttttctacgatttcatattaattgaatcataatgtattttttcaggtatctttcacctagcataattattttgagattcatctatgttgtagaatgtatccataattcctttttattgctgtgtagtattccattgcatggtcacacctcagagatgcagatttctattatcttcaaggacttaaaacaggcccagaaaaatttatgatgaatcatcaggcctggagacttatactgtgcatgaaatgaatcccctaacaatgttcaggaagcctccccaaggagaaagaagccatcacagtcttgtaggacctccctcctcctattctgccctctctggtccaagatccatttggattggcatcacacatagctggatttcagtcataggacttaacacacttccttttcctagcccctcttccttccctccccaatatgcaaaatacacacatgcctctcccagcctctaacttggttttccaacttgtaaaaaatctaagatacagacaatgctcacattcagaacattgattgggaagcttctttctaattcaaaatgacaggcatatctcagagataatgcagctttggttccagaccattgcaacagtgaatatcacagtaaagctaggcacacaattttttggtttcccagtgcatataaaaagttatgtttacattattctgtagtctattaagtgtgcaatagcattatgtctaaaaaaaaaaaaaccaatgcagttaccttaatttaaaagcactttatggctttaaaaaagtgttgacgcagacacaaagtgagcatgtgctgttgaaaaaatggtgccaatagacttgctggacagtgttgtcaaaaagcttcaatttaaaaaaaaaaaaaatatctgcaacatgcaataaagtgaagagaaataaaacaaaaatgtgccagtattttgaatggatccaggcattcttcctatagtgaaagatgaaaaactaaaatgcaaatactctggatgaagttgcaggaaaagcagtgctgaagtcatcataaaatcttgatatctcattaggaactttcctgaggaacgccttttaaaaacattttatggatacatagaagttacacatgtttcgggggtatgtgtgatattttgatacaagcatacaatgtataatgatcaaatctgggtaactgggatatccatcacctcaaatactgttactttgtgttaagaacattccaaatctattccatttattttgaaatatacagtaaattattgttaattattgtcactctactgttatagtgagcaggcctcattttttccatctgactgtatttttgtactgattaaccaactcctcttccccctatcgcctactaccattcctgaggaatttttttaagaaggaaagaaaacaggtgacttgaagggaagagaagggtttcaaagggagatcaatggtgtataaatagactttggctcaagaaaagacaaacaatgttgctgaccatcagttctaaagccgccatccccagttagagaggaagagccattctgactgttccaagcaattttgtagggtctttgtgggatgatatyggggtttgctgaagccccatacacaaatcctgcttcaacgttaaacttgttttctctccataacatgcagccctgtttctcatcactcagtaactactcagtctgctagtgctttcaagtgacttcccaattgatgtcaaaatttgtttgcctacaaatggcctttacgtaagacccagatctgtggttgaattgctctggcataagagagaccaccctgttggcacatgcatgtgaacacacctcacagacacacacaaagctgggaaatgggaggggaaggatgtcctggaggagcctggaagcattccaaagcagagacttggagaggagacagaaaaagaagagcaaacactgagaatggcaggatatctactgtaaatgttcaatagtgctttatgtttgtggttcccatgaggcggaatgtgggaggaaggggaaggaagttattagctgaacaagtaccacatgctgtatgctttatagacagctaatcaagtgcccccagggcaactctaacaatattcctatcctcattttatagatgaggaaaatgaggctcaaagataagtaacttgcccaatagccatgcaaccaataaccagcagagggacctgggtctctccactccaaagtttctacaggttcccctcttcccagttaaagcacagtgtagggtcctcgggcgcggtggctcacgcctgtaattccagcactttgggaggccgaggccagcagatcatgatgtcaggagatcgagaccatcctggctaacacggtgaaaccccgtctctactaaaaaatacaaaaaagtagccaggcgtgctggtgggtgcctgtagtcccagctactcgggaggctgaggcaggagaatggcatgaacccgggaggcagagcttgcagtgagccgagatcgtacsactgcactccagcctgggtgacagagtgagactctgtctcaaaaaaaaagaaaaaagaaaaaagctgagtgtaagagtgagatggagatgagccaggtagagaggatgcatgccaatgtgctacagggtttgaagagtagcaggaaagattcgaacatgctggatgaagaaacaaagaaagtatggaaagaggcagggaaaaggagggttcttcttgggcaaaaaaaaaaaagcagggaagatggtagaaacagtcagttatgaaaagaccttggcaggaaacagaaaagtgggcagtaacttacagggaaagttttaaatggaagcgataaaagaaaactcaagagttatctaatctcaagcaaatagtcataatctgaagatgactatctaaggtaagagttaaagaccagctaacatggactgaatacttgctatgcatttggcactttttaaggggcaaaatagtatagggatatgatttaagggctctggagtttcaatctctgtgtgaccttgggcaagttagataacttccctgtgcccccctatctagactggagataatagtacctcccttatgaaattgttgggtgggttaagtgaaattggataaaatcctcagggtcgtgccagacacatagtggccctcaataaattttaactattattatgaggtggtttgcattcaccatgtctttaatcattacaaatctgtgaagtgggtattactattcttattttacaggtgagaaaacagacccaatggggtggagagcgattattactggtcatctggtgattaaacagacgtttccacagyacttcccatagtccctttcccctctctcaaaggaaaaaggtcactctggtgatgatattcaaggggaaaggcctgccaccctcacagatgccaggcattgatggctgcagtctgaccccattcttttttccccctcatcctgcagggaatgtgtgtggttcataactttaaaggaacgcaaggatctccttccaaacccaagccygaggatccccgtggagtacccytaatggctttcccaaggatagaaagccctctggaaaccttaagtgcacaggtatggtaaagcagttttagcaaaccaaacccacaggctgaacactttgggaggtcagtatcaatccatgaataccacttaatctacccagcatcaatgagaatctgattaatttattgtaaaggccctcacaaaaggcagccttcactttttcccctcaattattcctatatttattccgggggttggggcaatcatgaatcctcagagagttcttagtaatgtctaacttaaaccttagctgtttcaggatactttgacctacaatataatatcacattcatgaaatttgcactaatcatatggaaaaaagcaatttgacttaataactaggatcatatttggaaagaaaaaggttgtgttacacacagtgatgtaagttggaggcacattttaaaaggctactaaatgtccctttggacctgtttttgtgacaaaaattcaatgcaacagtacctcctgatctgttactctacaacagamccttgcatcataccagggatacaaaaaataattgatatagtccttgccctcaaataastcatagataaggrgcaggcatggtggctcacacctgtaatcccagcacttttggaggccaaggtgggaggattgcttgaagccaagagttgaagaccaacctgggcaatgtaacaagtcaccatctttactaaataaataaataaatcacagatgatcaggaaaggtggatataaataggtagtcataatatgacatgctgaatcagaggtgcacaaagtgctgtatgaatacaaatgaaggggaaaaaaatctactccatgtgagaagacagggaaagccaggaagacgacttgccaactgaaaggagcctggacagatsatatgaagcacttaatttttcccaggacaattgctaggagctttacaaatatatcattacttgaacaaccaccctattgaatagatactataattcctatttcacaggtaaagataagaatgcagaagacaggccgagcgtggtggctcacgcctgtaatcccagcacattgggaggccaaggcaggtgaattgcttgagcccaggagtttgagaccagactgggcaacatggcaaaaccctgtctctactaaaaaaatacaaaaattagcccggcatggtagcgcatgcctgtagtcycagctactccagaggctgaggtgggaggagtgtttgagcctgggagattaagactacagcgtgctgtgatcgcgccactgcactctaggctgggtgacagagtgagaccctatctcaaaaaaaaacaaaaacaaacaaacaaaaaaaacactgaagacagtgatgttagattacctgcccgaggttgtataggtagcaagtaggaaagctggatgagtaggagttctttaagcagatgggggacaactaataatatgattttcattagcatgtcatctttttcgggtagctgagcccggctaaagtgtttatgttttgtcatagtctgtttatcgtaaaatcttgtttgcatttggcattttcctactcaagcatttttatagaagatataaaagataaatcacttccctttgttccctttggaattattatgtacttcatatcagtgcaatataaaataatattttcactatttaacgattattaactatgacatctctctaagacaaactaccctatgctcttttttcccccgctgagatggagtctcactctttcgcccaggctggagtgcagtggcacaatctcggctcactgcagcctccgcctccggggttcaagcaattctctcgcctcagcctcccaagtagctgggactacaggcacgcgccaccacgcctggctactttcttgtatttttagtagagacggttttttgccatgttggccaggctggtctcaatatcctatgcctttttacctttaattaaatctaatattattaatgaaccaggttttgagggcggggcttgggggggttggaacaagaaatctacctccgtatctccattttaggaaaaatatttaaggttctccattaatacagtaccaagtattgttttgttttcccttaatttgtattaaggctaacattttaacttggtctagaaataaaatattaacaaaaatatttctggtttatttatatacagcctgttgctacaggttaaatatcaaattagctaaatagcgataccctgtaatgaaatagtgaaatagaatctctctaacttttcttccctaattacaatcctgtgtttagtgaagtcagagagggtctctattttggggtggtaaaatgaaaacaagtgaattttaaaaagaaacagaaaatatttgctgagttccatagacataccagtctctgtgtccttgtaaatgctatcccccgaatatcctgatataagaacaccccttttgcacacctcatccttccacccagcactgctcaagcatgacatctgtctaatgtcttccctagacttctttctctcttaattctcagggccactgatggttgatcaggcctagagatgtccagactctattttgagggattctacttaaattgaaaaatgaagtgctaaacagggtttcaaaaaatgctattcacaagataaaggattcttaaaatagatattaattcattgtttacaggtagtagttgaacttctctcaaacctgtcaacagatctttgtgattatggatgccgcctcatatggatacaatttgaggccttgcccgaataccaggcttgggccaaaggaccctccagacccctctcatgtgactgtcactcataagtaaagccaagtgttccctcatgtctgcctcctccaaagacttgggactttttgaggaccctataaaccatgtcttatttaccatgtatcctggcatccactaggtgtgaaatacatattgatggatgaatacaaacttgtcccaaaacctaaagtagacactttagccaaaaccaagaacctcaaatttgaccataatcactatttgaacatccacggaaagtagagatttataagaaactatgagaaggacttctgcaggctagccagaatgaagccacagaaagctaaagagaagtattgcctctcacattatgctatccataccagtcgtgaaaaatgcaagtcaccaagcatctgtttttagtaataaatgtttccacatggatagttagaaagataaaccctttatttgttggtcaagaaaagagaactagcatttattgagagtcacctcatttaatattcatgatactgtattggttttattatatcctattttatagatgaagaaagtaaggcaccaggtttaagtaatatgcccaaggtcacccagtcaaaattaaatgaagacccatccaatactgaggccctgctggttctcctacaccacacagtctgagatttcattcaatgaaaattcttttttgaaatccacaactcccagcattgaatatgaaaacatgctacagggggctggtatactgaacctgagctacagtttttccaaagtaaatacccccctgtgagcaagaacttcccttgcaactccaacagccatggtttctgttagaaacggcatctttgtaatttttggaacagaaccatcttcccagcatgtggaccttttcagatcagagattagaacctctcttcagagcacacattcgtacacatgaaatccatcccactattcaaaatatcttaaggagaagactggatggggagggcatcagtcacgctcgtttccctttctcccaagacattctttcccctttgccacatgcagccctcagagccacagtgctctgggcctctctaaaacattacctcaaatttgaatatctaccttctgtgattccccttagtatagttgattgagatggggtgcattttctaaaatctttcccaaataccatagagaaaccaaaaagtaaacaattataaaacaaaaatagtcaagtttttcaaagcattattttatgattgtataaagttgttgggatcccaaaggaaccaattcttaattatccatgttctacaccccgccccactcacaatgtacatgagcaatcagctgagtgttgttcagttgagttcttgtccacacagtttctaataacaaaaattaaattagaaatgaaacaactgtgttaactcactctggatgtggtatagagtctccagatgtcttccccatgggggaaaaatatatataattatataaaatatatattaaatatagatacatatatacactaatatatatttatatacatatataagtatatatatatgttacatacatacatatcrtttaattttgattggtgaccttgggcatattacttaaacctggtgccttactttcttcatctatgtatgtatatatacttatatatgtatacatatatagttaaaagatacttatacatatttaatatatattttatatcacctgaggtcaggagttcaagaccagcctggccaacatggtgaaaccccgtctctactaaaaatacaaaaattagccaggcgtggtggcaggcgcctgtaatcccagctactcaggaggctgaggcaacacaatcgcttgaacccaagaggcatgggttgcagtgagccgagattgtacctttgcactccagcctgggggacaacagcaagacttcatctcaaaaaaaaaaaaaaaaaaaaaaaaaaaaaagacagaaatcaggaaagcaataataataattagatcaaagccacagtttgttaaagatttaataatttcatagacccaaagcattgagttttaagttcaaataaaagacaagactttaggtttgcaagaagtgggaggttatatatatatatattttgttgttgttgttttaattgaatgcttccatttgatgaacctggagcagttactatctgctgctaaagtttctattatattaccaatgcaagaaaaaaagtgtccttgagctttctgtctgattgtggcagccaagattgaatagaggagtaatggcagggaaaacatggagagagaatttttgcaactcagaaataaccttgtaaacagtgaagagcccattttactcaaaagaagaacctaaatatccaccctcacctagttgattacatgtataaaagcttaatagttaaaactaattaaaagccagccagtgacaaaaatatttgacataattacaaggaaaatggatgaatcctcagtcacaggagawtgtaatacttttctcttattaataagcaaacaaaaatagtaaggatacacatgatcaataaggttgatctgatgtgcattatatataaccctcctcaaaacacatgaaacattatgaaaatgcatcgtatacaagaccatgatacaagtctcaagaaaaacattttaatggatctgtattatgtaagccacattttctctagccaaaaaagttaaactaaaaacaaaccccccaaaaattctatacattttgaaataataaactcacttctatgtaayttgtgactctaatgataaaacatgtagaaaggttttaaacactagagctgtttcatrtttaaaacattacattaaaaatgtgcgggatgctaaattactttgaggctcttaaatgtttatattagaaaatacttaagcataagacagaattatatagagaataagtttaggtgaagatgctaggcacagtagcttgtgcctgtaatcccagcacttcggaaggccaaggtgggagggtcagttgagcccaggagttygagaccagcctgggcaacatagtgagacactgtctctacaaaaaatttaaaagttaaccaggcatggtggcatgtgcccagtgtcctacctactcgggaagctgagataggaggatcacttgagcccagcagatcaaggctgtactccagcctgggtgacagagtaaaccctgtctcaaaaaaaaaaaaaaaaaaaagtttgggtgaagaagttatcctattttggatgaaaaatcagggaagttttaataaaaagaggtaaggaggccaggcatggtggctcatgcctataatcccagcactttgggaggctggggcgggtggatcacctgaggtcgggagttcgataccagcctgaccaacatggagaaactctgtctctactaaaactacaaaattagccgggcatggtggtgcatgcctgtaatcccagctacttgggaggctgaggcaggagaattgcttgaacccaggagggagaggttgcagtaagctgagattgcaccattgcactccagcctgggcaacaattgtgaaactccgtctcaaaaaataaaataaaaaaaccaaagaggtaagggaaattcaggggccttggaaaagcatattagggggacggaacagcctgtgtacccttgaggagacaaaacaagggaatatttagggacaagtgagtgtgcacgtgtcaggcaaccctatctcagattttatctgcttgtgtttgctccacagaatcactctgcgtccatgaccgaagttacctgagacgactgatgtgtcacaagctgttttttaaaatcatcttccaattctatacttcaaaacacacagttgctcaatgtcaaactgtgatgacaaatattacgtttatctagttagaagctaatgttttgtacattttttgtatgaggaagtgatgtagcttgccctgattttttttttttttttttggtcagctttaatatatttatgccagaattttaaaaccaacaaaattttcttgttcaagcgtgcattgaagaaccacatttattcaatggttgacgttgttttgtgatatttgtacacaaattttcttttctcagttttataaacacagdatataacaattcactttaaacttttattaccacagttgctgcctcctccagaatttttgaattttaataaaaggcaaacttttgagctgcaggaaggacaatgttggttaataataaatctcaaagtcaattgtagaaaaaaaattgtcttcaaaaagaatgttgcactctgatctcttaacaaattgttacgttcaaagtttaaagtgatatattaacaaagtcacctagttatacaaacaattgtcagagaattctggatttggagggtattggggttatatgattctttcttagataatggcctctactaaataactcaagatctttctggaatgtcttctggcaggcaggtgccactgtcagcttttctccaaaaagcagccaacatcagcctcccctgtcaactcaacagttttgtatctcatattatatggactttatatgaaaatgaatattttacagtttgcacagtattattttacagaaaaggaatcagagaatctacaacatagggccccagaacaacagtttcactttgtggcttttaattattctrgaattttaactgcatctcatttttctagcatggtgagaactaatatgtaactcctttgattgaaggagctcttttgtccgtacctatcagaatgttttcttgacacttccatgttggctcttctcagctttttttgtacatattttttttttctaaagagaagaaaaagttatcacaaaatgtattctggctcatgtcttttgtcttaagctttatccacaggacaaaggtatttgaagagtcatgatgaagtgaactcaagtgtttacactgttcagttccacgtctgctgaaataaattctaataggggcatgactgagggatagcttcacaggtgtgtgtgagaatatgtgagtgtttaggcaaataaaattctttaaattattaagatactcagaaacattctggatccctagcacgctccctctaccttcagcctacccatagatacttctgagttgtcaataaaaagttagatagtagtttttaagaacaaaagttacctctgctaaaatttttcataatcccccatctcattctggcctaagcttacctatgcacatacaatgtcatacacatcttctgggtgatatctgactacagttaggagagggaaccaaagaaatttcacaaacataatctgtctgttttcaaaacactgagcccagtgaagctgtgacaaagccaaaggagtacgatatatgtcagcagtaatatcaaaacccaggtctgcccaactccaaatttcattctttccactacatcaagatatgcctttgaaccgagtccacatcttttcatgggttttcagtgtaataaacctacttatctggtttaagggatgctgctggaagaaaaggaaacagtgagaaggaataatttgtaagctctgggctctccaatcctgtataagctacctacctgtaatgtcacgcaatttcagaatgatttttctttttctaaacatattttaggattttttaaaaagaaacaatgagggattcattttattttattgttcatcataagacatgctgaaaaatgctggcagtctaaattgcttttacattacccatttcttgtcacaatgtatctggctaccagatagcatttctaagaacataagttggtagagtgagtcatgttatccttctattcttctttctagttctgattttaaagggacctatctgtagtattccaggagctttggccacagactccattttcctggccttggacttgggagatggtgtatgactgagccatgctgagacagcactctggtccacttggagctaaggggcatctctggactcctacccctggaatccctgagtctgattccctaccactatggcatggcaactttagtgttgcctcctatttagccccaagacacttcacaggcctcacactgatctgtcaagtctgtcattcgaaattcttcaggctagagactcctccatgtgggttgymtgccaaggaaaaagccgtctgtccaaataggacaagtggcgactgtagcctcagagaatgaattctgcagtaaacttttctctttttaaggaaagcccacaggtgcatgagaaagtctgactcttcttggaagaggaaagtgggggaggagagagaaacaaaggaaggctagccaggtgtgttgacataagcaacctcatgaagctgttagcccctgtgtttatctatgatgtcttttttttttattctgtgccaagaacatcacctgacacagaaaaatcacttagttaaaatttctgtaatacacaaatagatgccagacttattcctactttggctaaagggagactatgactcatttggaaataaagaggattttagcggagcctgaagatagctgaaagatgaatacatttagatgcaggactaacaatggtgaggaaactgcacttaccagctaaacatgtgggtgccccttttggtaagttctaaatatctccctatcaggctgtgatagacagatgggctatatgtagctgaaaatatagcccttcaggagagaatatgtattctgtactgaatcagagaatgcaagcaggcaaaattctaccctcaagatgcaagagagtaggaatcactgggatgatataaagagtgaaagaaccacaagtggcatttttgtttcaaaaatctgattagactccctattacaggcaactgccagaacctctcaaatgtgttcagtgtcttagaggtaaatacatcaaataccagattgccgaagtctgttttaaggagtagattacattatggtcattatactattcctgctcttatcggaggaacccacccccaaaatttcaacataggttctttctattttccataagtgtcagcaggctgagaaataaagatagacagtataaaaagaggaattttacagctgggctgctgggggtgacatcacatatcagtaggactgtgatgcctgcctgagcctcaaaaccagcaagtttttatgaagggtttcaaaaggggagggggtgtgagaacagggagtaggtataaagatcacatgcttcaaagggcaaaaagcagaactactactaaggatctaacaaagatcacatgcttctgagggaacaggacaaagggcaaaagcagaactatactgataagagtccaacaaagatcacagggcaaagggcaaaaacagaaccactgataagggtctatgttcagcggtgcacatattgtcttgataaacaccttaaataacagaaaacagggttcgagagcagagaaccggtctgaccacaaatttaccagggcagagtttttccccatcctagtaagcctgagggtactgcaggagaccagggcttatctcagtccttatctcaatcacacaagacagacactcccagagtggccatttattgacctccccccaggaatgcattcctttccctgggtattaatattaatattccttgcttggaagagaattttgcaatatgtctccttcttgcgcgtccatttataggctccctgcaagaagaaaaatatggctctttttgcctgaccccacaggtagtcagaccttgtggttgtcttcccttgttccctaaaaatcatggttgttctgttctttttcaaggtgcactgatttcatattgtttaaacacatgttttacaatcaatttgtacagttaacacaattatgacagtggtcctgaggtgacatacatcctcagcttatgaagataacaggattaagagattacaggcgtaagcaattataaaagtattattttggaactgataaatgtccatgaaatcttaacaacttatgttcctctgctgtggttccagctggtccctctgtgtggggtccctggcttcccacaacatgctctgttgaattcaagacatgtactagaactagcatgtcatttactatcatcccctatactactatagggatttttaaataaataccaaatcccttgctcacatccttattcttgatccagattgttccagaattgatagatgcattcacttattcaataagtacttaatgagcatctattatgtgctaagatcatgtgaagaactggagatacataacaaaataaacagacctatttcttacccttacaaagcttagagtcgagtgggataagaggagaaccaacacaaaatatttaatatataaatgtttttaagggactcctgatttagacagggaagatagagttatcagttaaggcttctctaaagaagtgacatacatattgggctattcagaataaggaggtaatgagacagaaaccctaaggaaagtcatatcaggccaagggaacagcacatacaaaagccctgaggcaggaaagagctttatacatgtgaagaactgaaggctggctggtgagtaaaggggaaaaagatatttaatgatactgaagatcagagatcttggaggacttgttatggactttgaatttatcctaaaatggtaagaagccctcagtggacaggaagccctcagtaaacaggagaatggcatagttagatttgtatttttaaaggatccctctgggctacatctgtgtgtagaaagtgtaagagggtattgtgttggactaaacatgattatgattgatgtagggtagtggcagtaatggtaaagagaacatgcattggaaagatatgaaaaatatctaggaagcagactcaacagagtttgagacccaattgtatgtggtgggatcatagctttcaataaacactttcttcctagagaacacttttccagatctgattcccccaactcacaggagcctggtgacagatgaaaagctggaaaggaaaataaattgaatttggatttactctctagcccattgacccataacagttttacttctcatggaaacccaggtaacaccacacacacttctaacactagaaatgactctgccaggaaaattaacttttgcacctcgccaaactagtgcctctgtcctcatcctggcttgtcattttggtatcctgtgtgtcagcatctataaaaagttacattttgtggctttcctatcaagccaagtaaaaccatgtgatcaatggaggggaggctgagggtaaagctcttttcctcaaaagcattctctttctctttaaaaggaagatgtgcttacatttccctattaatcttaatggaatatccatctatcaatttacttcatgttctttggaacagagaacaactcttcctttgggatgatgtttaatgctgttatacaaagtaatttctctgttgaattgtcctataaggccaaaagtttttttcaacttcaagcgatgttttttagtatttcaggattggataaatccagactcactaaagtcacacagacttcttatatgtatttctatacaaaatatgtcccctttttattccccctcttggcggccaaaagtttctttctgtctttgtagggatggtgcagtcaggtgttttctcatcttggcattttttgctcttcagcagccatggggtttaagtgtgcgggtgagcaggtgcagctccaccacagcagcccattgtctggtgaaggtttctctggttcagggcctgggcccaatgaggtccatacctagggataactaaccagtcaccacttgtggaattaattcatcatttgagggatttaagtgtgacaaccttgaaaactaatttctgtacatttggcaaaattaagtcaagcctagaaggcagacccgggagccaagattccagcagaaccttgcaaagaagaaagctgaaaaaaaaaaaccacatttcattatgctgaaatcagatccctgaaaagtaagacctgggtggtgctgatcccaatgagggaactccagttcattttgttttttaaatataatggcaacacccacaatagaacctggatgtattcatgaaagccatgggtaaaaggaggaataagaaaggatgacatatctataaaacaagaacacattttaagaatcagatccaattatagaacatgaaaattaaaaatgatcaaaataaaacccaagagattagctaaatagattagacacaccttaaaaacaagttagtaggttgaacagttaaactgtaaaattctccaaggatgcaggaggagaaagtagagagaaaagtaagagaaaattttaatattcacggagaatgaatccagaagctccaaaatcctcttaataggagttccaaggaaggaacagaaaaaatggaaaaggtgaagtggtcagataattaacagaagcaaatgtcctaaagctgaaggcagattgtcttagttcgtttgtgctgctataacagaatacatgtgactgggtgcttaataaaacagagaaaagtatttctcacagttctagaagctgggagtccaaaatcaaggtgccagcaggttcagttgtctggtgaggactgctctgtttccaagatggtgccttgttgctgaatcctcaagggaaggaacaccgtgtctttatgtggcagaaagcaaaaagaccaaacgctccatgaagcctctttttataagaaccctaacctcatccacgagggaggaagcctcatggcctaatcgcttctaaaaggcctcagctgttaatactattacattgtatggcaaccctcccatt

SEQ ID NO: 95447 - DNA, 52128 bp, Homo sapiens
  misc_feature (1)...(52128): n = A,T,C or G
gatcaattctagacatacttgttctttcctctctgtaagcacagtttctgtgttaagcaccaattacactggggtcattaacatctttctcaataattttaagagcccctgagtggtctgtgtgtgactagaacataagctcccagagggaagggattttgttttcaacagagatccactactgtaaagatatcaattctccccaaattaagctatggtaattaaatataatgttgactacggtacacaccaagcacccaaaatagtgtctagcacaagtagctgttgagcacccactctttgctagaaaatggggatacaataattagaaaacagatatgaatacatcaatcacaccttctcatccacaacacagtatttctctccatttattcatattcaagtcattcttgtcctttggttaaaactagtttccttcattatagggaccttgaacatttcttgtttattcctcagtattttagcacttttgatactatctaaataggatagtttttctattagactttcaaactgtttactgcttgcttgtatactgtattttctctccagccatcttactgaactcttgttagttctgacacaaaactcaagaagattaacagaaaaactgccatttacaaataaaaactgtctctttcccttctgctactttatttttttcttcttattctcatttcctattttattgctttaaccaaccccttcaggacaatacagacgaagagcaatgacagcagacaaccttccctttttctaaaattaaaagcaagtttggtataatatttgctgttggtatctggaatatagttgtttggatattccttgttaagaaagcttctttctaattctaattagttttgctttactgttgttttctataccagaaaagactaaaatttttaggcttcgttttcattaatttataaatgtaacatagagcattaacagattttgtaaaactgatccaatgtatttctagaataaaatctagtctgtcacagtgtattatgctttaatactctactgaatttgatttgtaaaattaaaaattgttgtgtgagaacagtctgtaattttattttattttattattattatttttttgagaccgagtttcgctcttgtccaggctggagggcagtggcgcaatctcggctcaccgcaacctctgcctcccaggttcaagtgattctcctgcctcagccttcctgagtagctgggattacaggcatgcgccaccacacccggctaattttgtatttttggtagagacggggttcctccatgttggtcaggctggtctcaaactcctgacctcagatgatcctcccgcctcagcctcccaaagtgctgggattataggcgtgggccaccacgcccagctgtaattttattttttatgcactttatgcagctaggttattaataaaaggcaaggaaagatgacaagagtaattaatctatacactatagaaaggagaataaagttatgactatgtctattaatagtgcaactgttataattatcaaagataaagttatgacataagtgaaatctgccatgatgactctaataaatttatgtttaaaatctgtaaagttttcatattaaagtttttgaaaataaaagaatttatttaggtaaactggcacacatttgcttgttttattacctataaacagctaggagaataaaaactaacactcaaacttttttaaaagcttaatatattttaataattaagtcagttatatttacttgtcatatgccttaaaagagctttaactggctgattcaattattcaaaggcccaaaactatacggcccaaaaagactgacgcattatttatttccctacaaatgtggaaatcttatcaaaatgaaggtatacacatgttgctgagcatataaaacaccatccctgtcacaggaaaataaaggaagacattgagtctgtttcgtaattaatgaaaaagagggatgtgctagagacaacacagtgagtcagtggcaaccccagaactagaacacagagattgtgacctccaaccaggcttcttcccattatatcaccatcactgaggtggatgagcctgagatgtcaccatatcccctcacctgcttcttcactgagactgatgaattccaacagaaacaacatcctttcacagctgtttaccatgaataccgtctcaaattcattcagatctctttgtctcaaacaacacagaatttcaacatccttctcatttattctcacaacagcctcattgcacagcagggctacacagtctgcaggtgtggaaactgagacaaagtcaccatctagagccaatcaaccttctagtcctgtccttgtctccttaaactacgtctgtacctctttttatagtactttatttataccatgccttgagttttcctaaatttatgtaaaacagagaatagtacttaatagaactgttatgaagattaaatgagttaatatatataaaaataataagaacagtgcctatcacatcgaaagcacaccataaatattagctatttttatttttactcaaaattatcaaatgtgtccaaggactttccagtccaaagcttctgactgctttttcaatggggatgtgtcataactcctaagccaatgaggtccaaaatgtatttaactcgctctccaaacgggctcctttttctggcttcaccagtactattgccacgctgcaaatctgactttgattcttcaaccttccctacctccaatatctaatccattgctaagtctgatcaattctagatatacttgttctttgctctctgtaagcacagtctctgtaagcaccaattacactgggatcattaacatctttctcaataattttaagagccactgagactagtctccctgcttttctttttctttcttcaatccattcttcacacagctgctaccgtgatctccctaaatgacaattcttattttactctgctattatattagcaaccaaactctcattcagccttaacagcagaataaagcctaaacttcttaacgggtactgaaaggcttctggacccaaactatctttccacccttctcaccacaacatttcaaaaagggactgactatttactgttctctcaaaacactgaactcctttttgactctctgcattttcccatctccttacttttgctcagaccctaccctcacttagaggggtcttctcttcatctccgcccataaatgccattcttcatatgccatttagtcatgtcttacattatgtccaaaaagtgctttctctattccctttatagtttcagagaattttatagctgggatcacctcatcttacaaataaccatgtctgcaaatgctaaaatcaagtaatcaaggtgaccggcaggtaggcctagaatttagatacaacttcaaatcttttcctaaaccacatcttccccctttcatagtatttaatcacaccttgtcttgtattttagttatttatgtaattattcgtatgttcattcaattgtgtgaagactaaaggcaaatgtatttcagatacatcagttgtatgaagtagaacttcagatgtttgttgaacctaataaaaattgcaacaagaaatacagcaactcaagattaacccagctacatggggtgggggcaggggggtggttcgccggggggaacaaaagagtgggggccacatggcagctcccctctgccacctcagagtaaatgtcactttaatataataaagtccctgaacatagctaataatttcttcctctgaggaaaataacagttgccactctcacaggcatctaagattaaatgaagcattgcaggtagaagacttaacatacggccaggcgcggtggctcacgcctgtaatcccagcactttgggaggccgaggcaggcagattacgaggtcaggagatcgaaaccatcctggctaacacggtgaaaccccgtctctactaaaaatacacaatattagccgggtgtggtgatgagcgcctgtagtcgcagttactcgggaggctgaggcagcagaatcgcttgaacccgggaggcggaggttgcagtgggccaatatcgcgccactgcactccagcctgggcaacagagcgagactctcaaaaacaacaaaacaaacaaacaaaacacttaacatagtgccgggtatatcattgctggtacatcatttctagtcttggccttcctctcctttaatatagcctgttctactatccagccctgccatgacactcctctgccttaaaaccttccactcttcccaccacctcccttactggatcaagtccaaactgtttggtctggccttgtagaagctgcttccaagtcctatctcagcccaagttgcctctccaggctcagcacctgctgcttcccaccaccaccactagggtcacatcaaactgtacttggctccctaaacacacaagttctgctaggccgtctcattcttgtgagttttcacccataatatagtggaaaagcattggttttaaaatcagacttgggttcacttccagctctattacttacgagctccgtgaccttgggcaaatcatttctactctcggggactaattccttatttataacgctacgaccaattgtgtgtgtgtgtgtatatatatatatatgaccaattgtgtgtgtgtatatatatatggtatatacatatatatatatacaccaattgtgtatatatatatatggtatatatatatacacaccaattgtgtgtgtgtatatatatgtgtatgtgtgtgtatatatatatatatcctaccttatagtgttgctgggaggattcaatgaattaatgcatggaaagtaattagcatcctgcctggtatctagaaaggacttgatcatgttagctataattagtagggtatgtttctacttcactcctcacagcactaactacattgtactgtgactgcctctttatgtgtctgtctccctactggattgtaaagtccatgaaagcacgaagtatatctcttccagcgttatgtgtacacgttaattactgaaatgatatctcttgaataaacgaatgctttaaatgggtcctgttaccaaacaccttcccaaggctgtgagtagatgcacgctccaatattgtctcaytttcccgcggcttcgtcaccccactctatgcactctgcaccggtgataccactttaaggtagatgaccgtctccctcgactgtgagcccctagggttgtatactcacctcgcatgcaagtttgaggattaagcgacataagctaagtaaaatgactggttggtgcttaataaaatgtatcactattattcacggaaggagaaataggtcgctgtggagggcgaaagggggaggattctagagccactgcaagatgcgacagggtggggtagagaggggaggcgactcccaaagctgcggaggggacctccgggggtcgacctgtatatgcgttggaggactggggaggggggcccgggtcccaggatccgcggagcccaaggggggctaggcccaggcccgagaagccgcagccccatgtctcccttgcctgtcctccggatagcctcacctcatctactttcagctcctctagagtgggcagctccactatccccggcatgacggctgcagccccgaccccgacgagaagccctcagccgcgtcgcccccgtctccttgaactcccctttcgaccgccgagtgccacacggcgcctgcgcatgcgcatccggcaacacgcaggcgtattgccctgcccaaccacgagcgagggagcgtgcgcaataccaagaacttttcagcctccagcggggtggggcttcgattcggctccgcccacccctccaggttgtcatagtgatgccgtatccactgagactccggatcctaacagctggaagctaaaaacaggcgccatggagtacacagggagcaaatatatcggggaatatgtagatgggaggtaaggggctcatttgattcacttactataccttgaatagctgtgactggaaaaagacggctttttgcttctgcgaaacaccttgtgccaggcactttcacaaayttgcccgagtaattttttcaaggaccatatctaataagcagcaaagctaagatgcattcattccatatatacttatatgtgtgtgtgcattgactgtgtgtgtgtgctatctgccagttttaaacataggaataagaatatttaaaatgtcaagatccttgctcttatggagtttataatccagttggagatgtattgccaataaacaaataagtgataaaataattacagataatggtaaatgctataaaaacaaacacgaagattagggaagagagactggctaatctgaatctacacggtcgcttccttccaggaggagttcacgatctagggattattatagaggattatatacacaaatcactgtagtggactagtagtaaaaaacaattcaacagtttttttttcttttcttttccttccttccttccttccttttttccttccttccttccttcctaccttcctctctttctttctttctctctcgtttttgttttattttcagacaagatctcgctctgttgccctggctggagtgcagtggcctgttcactgcttactgcagcctcaaccccctaggctcaaacaatcttcccacctcagcctcccaagtagctgagactaccggtgtgcaccactacccccagcaaatttttcaacgccttttgtagagacggcatcttgctatgttgtccaagctggtctcatactcctgggctcaagtgatcctcttgcatgagccaccgtgcccagcaattcaacaatgttgagtggctaccgagtaccaggccctgtaattgactctgggcacaatccctgtcttcagaaagttcattcaaacatgatgcgacaagtagacataacagataactgcgattcagtgtggtaagagctgtagtagagagaagcagaggaaacacagaggtggccactcttttttgccaaccaccctggatgaagaaagtggaatctctgtttttatagctgaggaaaccaaggctggacgatatgaagtggtttgctgaaccagtgctagttgtcgggactgtgaagcactcccaccttggggctctgtattcacaagttggtggaattccagggcattctgagttaataggaaagagggatctgtggtctggacagggataggagatagattcctagagagggtggtaggaatgctatgggatgctatctctctaatcattacatcaattttgcaaggaagatgttattatctttccaggtaagaaaggtgacccttacagggcttgagacacttatcctactcagcaggtaagtggcagaggtgcttggtgtgtactccctctcactactcagtgagatagttcaggctgaccttgcaaataaaggaacagaagttaggagaagcaaaatgactggcccaccattatggatacacagctaggaagtaacagagtcaggatttgaacccaatcctctgtccaaaccacattcttacttttcacaaggctctgctacagtgaaggtggtagaattttggcagatagagatggggtattgggcattttaggcacaaaaagttgagaaactacattaattttcgatgggctgtatatgggtgagagagaaacacacagacaaggtaaaagayggaaggctttcaaccatttgcctttggccttctgtgtattttcattgggtttgtgtgctgaatcagccatttccatgctttggccctaggaatttgggctttgcttgaggttgtctggtacctctgtaaccacgatagggattcccagacctgaacagggcttcccaatttcccataactagcaagaagtcagcagtttttcacttgttatacttcttttcataagttggacatgtgttgttctgtactgattttgtatttttaacaacagttaactagaattctatttggggcatctcaaatttcagcatgtaatgagaggatgagacaggtctgggctcaagtctgccatttgcttgttgtacacttaattaaccatccatacctcagtttcctcatctgtaaaatgggaaagcaatgcacattcagcagcagtgttccaaggaatatgtaatgatcatatatggatgttatttacaaatggtagatactcaatcrattttttttaatttagggaggggatattttcctcttggagtttaaatgaatagagtaacctctctatacagtaggaagttgatatttaacgtttggtttaaaaagtttatgtagactctccatggctgataggaacatcaaatggtacgactgctttggaaaagtttggcagtttcttgaaaagttaaacagccattccacttataggtatttaccccagaaatgaaagtgtatatatacacaaagacatgtatacaagtactcatagcagccttatttataataaccaaaactagaaacaaacccaaatgtcatcaacaggggaatgaagaaactaattgtggtatatccattcattggaatactactcagcaataaaaaggagtgaactattggtacacagaacaacatgaatgaatctcaaaaaattatgttaagtgaaagaagccagacaaaaaaagagtagatactgtatgattccatttatgtaaaattctagaaaatgcaaatctatggtgacagaaagtagatcagtagtcacctagagatgaggattgtgggcaggggcaaggaggaagtattacagaaaggcatgcagaaacttttgtggggagtagatattttgtcttgattgtgatgatgttttcccaggtgatgtcaaaacgtgtcaaattgtacactttaaacacgtggcctattgtatgtcaattacacttcaatrtatctacttaaaaaaaaaaccttaaaagagacatgatttccctgtaccacgtgtgaatattaaaaaaaaaaaggttaatgtagtatctgtctgacctcaatattatggtttctttggagtagtcgcacaattgagttctagataactccactccaaagcaccacaaggtaagtgccagaagagacctacagacacaggggaggaagggacgcccatagcatttatgtagtaactactgtgctctgggtggctttgcctgcatcttctcttcacagggactctttgagatagatatcattatcctattttacagatgggaaaagtaaggctcggagtaaacytgcccaaagtcacccagttagcatttggcagagcaggtattaaaacccaggtcgatcagactgtaaagcccacaggcttcctacaatagagccctgctgctgtggcccttcagaggccacatacagtcggagccgtccttaaaggcttcgtggaagagatagtatttgaaatgggccttgaaggttgggtaggatttaggtggttggagatgcaaggtgaagaattctttttctagaagtttttaggcagagggaacagcatgagcaatagcccagagggcacgtatggagtagagctggcagttcagtttggcaggagagtgggttgtgcccagaggagttatgcaaagggaagctggacaggcggtctgtgctctggcaaagaaatttcaataccgtgcacaattctggtggtggaggaaccactgatagatcctggtagggccaagcatcaggaaataaaacttatttcatctctgtaactctcctcataatgcatatgtgtggtagagactcagtaaatgttggctgaatgaatgaatgaatgaatcataggttttgaggggtttgtttgagacagggtctcactctggagtgctctggctggagtgcagtggtgcagtcttggctcacagcaatgtccaccccaccggactcaagcgatcctcccacctcagcctccccagtagctgggaccacagatatgcgccaccatgcccagctaattgataggtatttgagatctggtaatcatatccttattatggattgaagccttcactataaagtggtttttttcttctttttaacttactttgaatttagaaggcaggcttttcaccttgaatgaattttttaaaatggaagagaaggagggagaaaggaagggaaagagagagagagtgaaggagaaaaagaagaagggaggagaaggagagaaggagggacagagaggagggaagcaggaaaagtgaagatggggagatcagctcagagctcactgcagttgtcccagtaagaggcagcagaaccctgggccaaggcagaagcagtgaagctgcaggaaagagaaaaatgtaggagaggtttggggattttactgccaggagttggcagctgattggctccagtcccgtccagagatggcttacagccccagccctgggcccagctcctggccttgaaccagaggattctgataccattcatggaaatagagaactctaaggaggtgctgcttaggggaggaggagatgagttctgttttaggcgagttggagatgtctgtgagaggtctgaacagtgatgtccagttcaaggtaagaaaaggggtggggtctaacctcagagaagggtgtagaacttgaatatrgagatggtgcttagaaatgatagatgtgagctcaagcaaagagtacaggagggaaggagaagaggaattctcccttccccccatgtcttgcactagaataaaagtgaaatagttttcaatttcttgttctatgccgggcattctgctatagtttcacaaccatcgtctcactcagttatctcaacaactttgtcatccactctgttcactgactactctttctgtttccttcattctttactcaggagacgtttatgaagcacctgcttaatggttctaggagctgaggataccaaagtcttcctttaaagaagcttttcttaaatacaggagataagatacctaattacaaaacaagatagaaagtgttacacatcccgacagaggtattagcaaaagcctaaagaaggtcagagttaggagaggagccttcagcttgttaggaggaatggagaaggaatgaatgaaagcatatttattaagcactcactatatatatgtcaggccctttactaggaaaatcgttatatgttacctggattaattgcagccatttcacccataaagaaactggtcagcccagtgcagtggctcacacctgtaatcccaacattttgggaggctgaggcaggaggatcatttgagcccagaagttctagatcagcctgggcaacatagggaaaccccgtctctacaaaaaaaaaaaaaaaaaaaaaaaaattaaataagccaggcgtggtggggcacacctgtggttccaactacttgggaggctgaggtgggaggatcacttgagttcaggggattgaggctgcattgagccatgatcacacagctgtactgcagcctgggagacagaacaagatctggtcttgggaaaaaaacaaaaaacaaaacaaagaagctagtcaactggtcaagctggtgtccctgccttgttctcctgtatgagcctgtcttcctcctgcatagcacttatcacacattgtataattactcaattttgtcccccactagactgtgagccccccgaggacagggaccgcatctgccttgatcactgttgaatctgtgttgtattcagcaagttggaccatcagcatagtccctgacaaaatgtaggtgctctgtaaatacctgtttggaaggaaagaaggaagggaaggaagggagggaggcacaagcaaagaggtttgggaaagtatctgtattagtctgttctcatgctgctgtaaggacataaccaaagactgggtaatctataaaggaaagaggcttaatggactcacagttccacatggctgggaaggcctcacgatcatggtggacgcaaagggggagcaagggcacatcttacatggcagcaggcaagagagcatgttcaggggaattgccctttataaaaccatcagatctcatgagacttaytcactatcatgagaacagcatgggaaaaacccacccccatgattcagttacctcccactgagtccctcccatgacatgtggggattatgggagctacaattcccgatgagatttgggtggggacacagccaaacaatattagtatccaagattatatatatatataatggtggtaagcttcaaacccttactcctgtctctaaatttcatattttccctaatattccacttgtggcataataggcaaggatgggttggtcatgggggacagagaaatcacagaactagctgccagaaaacctgggctctagtgtccacagtttttactgtgtgtggttttgggcacatctctacrctctctgggcctactaggggggtttatttcagggagcagtgtgaactccaaggtgagagtgagcctctaggtgaaggggagaatgaacagagcaaactctattcccctcttttcgtttttgagcttttgagggaaacaaaacaaaaattttgttttcagcagagtactgctgggatgagaaggatgagaatgctgagaacggggttcctgctcactctgttgcctgccagctctgatcctccasctgtcacacagggctcagtgatttccctgtgtctttacaggatggagggcaaagccaagtacatcctccctaccgaaacaatatatgttggggaaatgaaggatggcatgtttcacggcgagggaaccctgtacttccccagcggaagccaatacgacgccatttgggaaaacggattggccataaaggtgatcagctggggggncggatgctgtggaggagagatcctcacgcaagaagagcctcaccctctggcaccccatcctccctgtctggtgcccaccttgttccattcactcttctctttgcttctcccccactccccccactttttttttttttttttagtctcactctgtcaccaggctggagtgcagtggcacaatctcggctcactgcaacctccgcctcctgggttcaagcragtctcctgcctcagcctcccgagtagctgggactacgggcgtgcaccaccatgcccagctaatttttgtatttttagtagagattgggtttcaccatgtttgccaggatggtctcagtctcttgaccttgtgatccacccgccttggcctcccaaagtgctgggattacaggtgcgcaggtgtgagccaccgcacctgacctttttttttttttttttttttgaaaacgagtctctgtcgcccaggctggagtgcagtggtgtgatctcagctcaccacaacctctgcctcctgggttcaagctattctcttgcctaggcctcctgagtagctgggattacaggtatgtgccaccatgcccggctaatttctccctgcttctggatctcccagggctctagaatcctctccctctagatctggaaggatctgtggagaggccatgatgagtttgcatctgttacaccacttactgcctgatcttaggcccacgacttcacctccctgagagttcttcacctatcaactcgggacagttagttgcattagttatgtgttggtactataacaggttaccacaaatttagtctgaaatcagcacaaatgtattatcttacagttctagagctcaaaagtctgaaataagtcagcaagcctgcattccatccagaggctctacgggaaaacctgtttccttgccttttccagcttctagaggctgcctgcattccttggctcatggccacgcatcactccgacctctgctttcatcatcacgtcacccttcgtccctctgctttcatcgtcatctcttcttctctcaccctgaccttactatttccctctcataggaaccttgcaatcatatttggcacacccagataatccaaataatcttcccacttcaggatccttcatttaattgcatctgcaaaatccctcttgccatgtaaagtagcatattcacaggttgcagcagacagggacatctttgggggaccattattcagcctaccacaatagtacaaggcacctcaatatatatatgtgaacactttgctaagttcccagcacacaagaggcactcaataaatgttagctcttattaccaccatcactgctactatcattataacttacctaatccaaggattcttaccccctggtatttgtgagtcatgaatagaattcagggagtcactgaaacctcttgatttatatacagaagtttctgtgtaaaggggactaagtttttctccaggaaaagcatctatagctttcatcagtttcactaagagcatcttggggcctgactcatgacctaaaaaaggttaagaaakgctccttgttttatagcttggagagtctaagccccaggaaggggatgtgactttcccgaggtcacacagtgaattaatagtatcattggaatttccacccgtgtttcctgatgcccaggccaatgcaatttctacatcctgaggcttcctttagcagtaaggcagcaaaggcagaatgtatgtgtttggacaaagggccgtggctgatggctctgacctttccagctataataataataaaagaataataacatttattgagtgcttactttgtgtcagtgtgtcagtcagggttcttcagagacacaaaaccaataggatatatagagatgtatggaaagagatttatattagggattggctcacaagattatggaggctaagaagcctcccaatcttccctctgcaacctggaggcccaggaaagctgttagtgtagttccagtccaaacccaagggcctcaaccagggggatcaatggtgtaagtcccagtcagagttcaaaggcctgagaaccaggaatgctgatgtccaagggcaaggaagatggatgtcccagcacaagcagagacagggaattggcgcttcctctgcctttttgttctatccagaccctcaacggattgtatggtgcccacccactttggtgagggtggaacttctttgctcagcccaccgattaaaatgtgaatcccttctagaaacgccctcatgaacacacccagaaatgttttaccagctatctgggcatccctttcacttaacccagtcaaggtgtctcacaaaatcaaccatcacagccaggcactgtgctaaatgcttcacgtgtgctatctcattgaattttcaatcaaccctattttatgtacactatcattaacttaattttacaaatgaggaaatgaagggccagagagagtgggtcgtctgcccaagttcatctgccaaagtgagttcacccactttgagcggcagggacagggctcggcacttatacccattccctcttgtcgtcacaaccataataattgtgatagttaccacttctttactgcagccatcagaaaggcccccacttcccttgacatctgaacctcttggccaaaagccttcagcttcctcagatgcacgtgtgtgctccttgtcttccagggcacatatacgttctcagatgggctgcactatgatgagaaaaactggcattactgcgacggctatgatcggaggttttacacagagatcctcaatggcttgaagcctgcaggtacccaggcacccaccctttccttcatacccaaactgagagggaaactaagacagtttcggataagtggactgtgtcctactaaagtaacttaaaggggaagaggaactgagcaggcgtagaagaatgcaaaagagccaggtcctggagccaggaaggccagtcctcatatctcagctccactgtgctagccagaggaccatgggcaagggactttacccactgcgcctcagtttctccccttcaaaatggagtcaatcagctgggcgtggtgactatgcctgtaatcccagcactttgggaggccaaggcgggtggatcacttgaggtcaggacttccagaccatcctggccaacatggtgaaaccccgtctcttctaaaaatacaaaaattagccgggtgtggtggcatgcctgtaatcccagctactcaggaggctgaggcatgagaatcgtttgaactcaggaggtggagtttgcagtgagctgacatcacaccactgcactccagcctgggcgacagagcgacactctggtctcagaaaaaaaaaaaaaaaaatcaaaatggggtcaatagcatcatctacctcccaagattgttgtaaataagataattcatgtcaggtgtttagaacagtgccttgaatgcatgtgggtgcacggtacatgtcagctgttcttattcgtggtacctactataacactaaaattatgtaaatattttaaaaagaaagagttaaggacgaaagcagtactgacagagcatgtgctttgtgtatcaggtgctgggggaggctctctgtaatccctgtctccctaatgtccagatgaccctgcccagtcagccttcctagtcccatgtcactccaggttgaggctgtggagttcagacatggttccctgtggcagagctcacactggtagcccagtcttcctctctgaggtcctctktatcatgctacctccctgcaaaaaccgtgtctcatcatggagggctacatttggactataagtctggattcagagagtggcaccttaaaattttgagacgtgttccaggtcaggtgagcctcaagacgaggggaggagagggatagtattaggagaaatacctaatgtagatgacaggttgatgggtgcagcaaaccaccatggcacgtgtatamctatgtaacaaacctgcacattctgcacatgtaccccagaacttaaagtataataaaaaataaataagtaataaaaaaataaaaaaagaaaagtgtagtttttggcacagcagagataatatatccaaaatgacagatggggaaacaactctgtatactataaaaacaatcccaacttagcttatgagagaccatgagctgtggttgacagagcatagagccagaaattgtgggtttgagtcctagcattctctctctatagcaggatgagcctgcacaagtcaacctccgtcagggcagaagcctccaggaagcactcaggcactggagtcaggcagacctgagctcaaacccccatctccttcccttcccagcttcatgaccttgggtcagttagttgaccgggtgagccgccttctctccctttgccctcctgacacttactctgctattttcctcctatccccaggcttctttgccactgcctcctcaacatccccccacccccagttattcacgttgaggttcccggggctctctggcttaggcattttctgttttcattctatatgctcttcctgaacaagttgatacacttctaagccttcaactaccatcagcttctaaattgaaatcagaatccctgagcctaagatccctgcatcaagcttccctgacacctgtattggtcgttctcaacttgtttgcactgaattcattgtcacccccaccgtgatggctgcctcactgaatgtcatgcccatccacctaggtaagcctaatcctcccttcccctgccccctaagtgcaatggtcctatggattttacctctgaaatatagactttatttgtttattcaacaaatatttattgagcacttccatgtgccaggcagcattctcttcatactctttgccactgccctgttccagccctccatcatctttccccttgatgacctgactccggagatccccacttggcgcccttgaggtcattctccattctgcagtcacttccatctttttttttttttttttttttttttgaracagagtcttgctctgttgcccaggctggagtgcagtggtatgatcatagctcactgtaactttgaactcctgggctcaagcgatcctcctgccaagtgatctggcctcctaagtagctggaactacaggaatgcgccaccactcctggttaattttttttttttttttaagtttcttgtagagatgggtcttgccatgttgcccaggctcatctagaactcctggcctcaagcaaccttccctccttaacttgggattacaggcgtgagccaccatgaccggccgcttacatcttttaaagtgtgaatctgattgcctccctcccgccccgccccttgagtgctccctataccctcaagataaggtttcaaattctcagaaacagtgacattctctggctcctgctcatgtcccagcctcatcctaggctacccacccttctcggtttttctctctcccctcttgcgatacttgctttctttctgtttctcaaagagaccacactttttcctgccattctctctgcctggaatactttaaccctcttacttcacccaaataactccttcccgtacttcagttctcagctcaacgtcctgaagctgggagccccttccctgaattcccacactaggtaaggtctccctgtggcatatcacagcagccatgacctcctcccagggcttggatcgtgagtgttcagctcgtcttcccaagctgtgagcaacatgagggcagggccctagcacattgtctggcatacagtgggtactcgttaaagagttattatcaaacagggataatgatactgacatcacagtgcagggtgaagtatgtgcttaggggagttaaggcaatgacattaagaaatatttcctaagctcctactgtatgtcagacactggctggacccagggagaccagagttaagaggacatcatctctcccttcaaagagctgccagtctagctgcagcttgagaaccttgcaaatcactcctcccgaattagttawgatgggaggcctggactttgccatgggctcttcaccccaattaaggctgtaggcaaaaagccctcagccttaagccttagctctcacacaatggctggttatgctaaagctaagcctctgccagtctcgtggtggcatttcccgaacctgcctggctctccccgaacatgcctggctctcccctacttctcctgtgaccctcagaagagcagcttgattctaagtagctacttccttcccttgtcactccacactttgcctcttggggctggcattgttagggcaactcgccctgcctgcaaggcagggtgagggttaaaagtgccccgcgacctcttcgagcatctgtgagatgggcattggcatgaggctttggtgagagaatggctgtaaagtgcttgacatggagtaagtgctcagtagtcattagccagtacatayggggttaggtttaggatcagggtcagtgtcagggttacggttaggtatgtcattaagcaacacaagagtacctactgtgtgcaagacactgagttgtgggcatggtgctgtgtgctcagtgggcatccagctctcagtctagagaacaaggaattacaggaactatagttagaaggaacctgagaagttatttattccaacctctccctttacttgagccatggcgtttcaagatacacatacctagcgtgcatgacctaaaaggtgcactcaatcttctttctctcccagaggtctcagtgtccctggtcctgtggctgcacctaggctgtctcctcccctgatgttggcagctgaacatacaggttccagagctggactgcttcctagctggataaccttgggaaagttactttaacttctctgagcctcagttttcttatctgtaaaatggagccacagagctgctctcaggattaaataaaagaggagcacaatgcctggcacataataaacattcaatgagtggcagccaccgtggtaattttggcaagagtcaaagttctccaccacctgccccttgtccacctgatccatttcttttctgctgttctccttcatacgtgctctgctctacaaggtttccagagtggkgcttaaggatccatgcctctggcctctgcccacgctttgaatgccacccctcttctggatctgatgctctcctatccatttgccaactctgacttaccctcagggtctgtctaacttcagaacctgtgccctttgtcatggtatccgaagaaatggaggaggatggggtcaaaggaagaagaagacagagggtctcgttcccaagaccctgttcccaagagccatgttcagaaagttcctttggggcaccgtttctgctgggtttgcttcttgccctgagtagggggtatttagttcaacaggggagccagatagtcacatgagccaccagccacaagtggaccttatgggaacactgggtttggatttggccttcatggtgaactaattgcccattatgttctttcaaggtatggctcaactcaccaatatggacccacctagaaaaatccccaagggctattacgattgtggagacggcttctataacccagtcacgagggtagtcaaggactataggaaccgctttctaagaaacgcaggtaggtttcttccgacactgcagcacgttttctcttcacccacatatgagtatgtgcatctgtatgtacaaatgtatgcacacacttgatgagaaagaagcttttgctgatagaagatgaaagttgattacctggatgttttattttttggacttctcgtggctggcaaatctgtacatagtcctagagtgaggtaaaagcacattcgtggtctagcagtgacggcacataaatgtcgcactgaaaggattaaggtacttatttttgtatgcattccttcgattttaatgggcacctactatatgctagacactgtgcttggtgttgggggaaaagcagagcaaagctggacacagccccccttccttgtggagcttgcattctaaaagtggcagagaagtactataaacagttaattgtatcatggaacaaacacaatgaagggaaaaacatggtcctgtgggaagggaaagtaggggccccagagaggtgggacggatgctgtgggagcacaaataaggggtatcaaatcccgaagcggttagtcagagaaggtttcaaggaggaaatgacttctaagctgagacctgaagaataactgggagttgaccacaaggcctggggagagggtttcccagcgagaggaaatggcacaggcaacggcctagaggggagtgatcccttgaggtgcaagaaggttggttcatcctttagccaggggagtaggtaccttggaggatccagaacctcagtttggtgagtcaacacaaggctgatcagactgagaagaacccatttacagtgaccaaactcacaggagatcaatacacaaataatagaacattttcctttaatgcagtgattcctaaacttatccttttctgaagtcacactcccactaggaatatcaaaagatacggaccctcttgccagaaaaatgtccaatgcatgcacacacacacacacgtgcacccacacgcgcacatgcatmcacacacacattttgcagatagtcttaaggggtgaatggtccctctaaagacctaggtcaagaaaccttgctctataatgagaaagaaactgccaggtagaccagaacatctgtgctggtgaatgagagcatcctctccctatagggaaatttactcagtaagtcagtgatgaccagaaaggtgcctcatggggctagaataagagcaaggagaggccgggcgcggtggctcatgcctgtaatcccagcactttgggaggccgaggmgggcggatcatgaggtcaggagatcgagaccatcctggttaacacggtgaaaccccgtctctactraaaatgcaaaaaattagccgggtgcggtggcgggcgcctgtagtcccacctactcrggaggcaggatgagacaggagaatggcgtgaacccgggaggcggagcttgcagtgagcygagatcgcgccactgcactccagcctgggcgacagagcaagactccgtctcaaaaaaaaaaaaaaaaaaaagagcaaggagaattgtcagctgatcctatgactggaatcctggagctaagatgcccgtaacccactggatgctactggaggaacatggcaaatgctcacactccaagtcccccagctcacatttcttcaatgacttcccttttccatttgcacaatgcactactatgtagcacgctaactctgctgggtgctaataggtttaccatgaagtttcttggtcaaataaaataaggagatgttgccctaaacaatgctaaccaggcttatttactgcagaactcctcagggcctttaatatgctaataaactttgtacttttccttcatgacacttatttcaacataattaaatgtaattatttgcttaatatctgtctctcccactggactgtaggatccgtgtgagaaggaactctgcgttatcttgtatcagtaagtgttcagttagaaaaatggaaagaggcaggacgccgtggctcatgcctgtaatcccagcactttgggatgccaagacaggcagatcacaaggtcaggagttcgagaccgcctggccaacatagtgaaaccccatctctactaaaaatacaaaaaattagctgggcgtggtggtgggtgcctgtaatcccagctactcaggaggctgaggcaggagaatcacttgaacctgggaggcggaggttgtagtgagccaagatagcgccactccactccagcccgggtgatagtgtgattctccatctcaaaaaataaaaagaaaaatggaaagaatttagtatcaggaaattgatggctaccagggaactagaaaagcaaaggaagacattgaggtaacagagaaagtaactgcaggatgcaggtaccccctcaaggactggggacaatagtaagagattaggttgtgagaacctagaaggtcaacagagggaccccccaggacctgcaacccagatccctgagcagagaccagctggggcttgctcctgggagctcagagcagggcttctgcagagctgggacccagacctctggcgggggagcactgccagtggagcctctgaagagagagatgaagctgattctaggagtgtggaaaaaactggaaactggaagtgaaatgacactgctgagatgacactggcatgaacaacaaagacaacagaaaggggcgtatctttgtctgcctgacagcccctaacaaggagccggctggcaaaactaatgtaattcagacagttccagtcccaccattgccaagttaagtatggaagtctcagtttggagctgagagtcagtagcttcttttttttcattttgagatggagtttcactcttgttgcccagctgggagtaaaatgacgcgatcttggctccctgcaacctctgcctcccaggttcaagtgattcttctgcctcagcctcccaagtagctgggattacaggcacctgccaccatgcccagctaatttttgtatttttagtagaggcggggttttgccatgttggccrggctggtcttgaactactgacctcaggtgatccatccacctcggcctcccaaagtgctggaattacctgacactgcacctaaccaggtgtcaatagcttctcactggcccagccaccccttttgttgctcagcatccacacacattcttctacagatattaagtcttctgtacaacattaacaaatgtatatttttttgtataacaagtttcaatgcatccttcatattaacacaaggccctctccccttctcccacagaggggagataggaagccccaacagacactgcacccatcttttgagtgaggttattccttggcagttctgcctgaagagtttataacctacaagctcctgccaataatccttctataaaataacaaggataaaagaggaaacaaaagaaaaaattagttaataaaaacaaatatgctagccaggcatggtggcttgcgcctgtaacctcagctacttgggaagctgaggcagaaggatctcttgagcccaggagtttgagggcaacctgggcaacacagcaagaccttatctcttaaaacaaaacagaccgagtgcagttgctcccacctgtaaacctagcactttaggaggcaaaggcaggcggatcacctgaggtcaggatttcaagaccagcctggccaacatggtgaaaccccatctctactaaaaatacaaaaattagctggrcatggtggtgcatgcctgtaatcccagctactcaggaggctgaggcaggagaattgcttgaacccaggaggcagaggttgtggtgagccgagatccgccactgcactccagcctgggtgatacagcgagaccccctctcaaaacaaaacaaaacaaaatgtgcatatagattaataaatagaaagatagatgacatagatacagatagacatacacatacaagcaaggagaaaaaactgtatcactactatagttctctttctgtaactggtcacaaggctgtagttaatattcataaattccttcttccattattcatcccaggttccatttgccttgagcccacccttccattgttctggctttttaccagtagggtgatcaaaaccttcattcctgaagggtccaaacccttagtggtcctgcctttgttggttatttagttggttgggttagttttttatgaacttttactgtggtcagtggaagtaccaagaggtgtcctggagaactgctgggttccatagagcgttccctttctcctaatggatggcagcattatcttctatatccagccttctctcaggagccaggagaaactggtggtaacacagatcataacagcatagagttgctcccagagaactcagtagggattactttaccctggaggccagtaagccagggaggtttcctggaaaaagaaagatctactcggtaacctaaaaaagaacagacgaatgcagcagggttggtaagagtgttaaaggcagaggggacagcatgtgcaaaaggattacagttgggagaagacatgtcataaatagggagctccaagtaattcaggggcatgagctaacagtatgaaaggagacaaagggcaagagacgaagcccgagagatgggcggggtgaggacaaaggttatggttgtctttcaccctaaggcagtggggagcaagggaaggctttaggcaggtaacatagtaactcatttgttctttagaaagacttctttgattacatatagagaagaggccaaaggagatcagattaggtaggagatccttctggtaagatgatgggagagaggagcatgtgaagggcatgggctcagggtgatgggataggtgacctsggatcctggtcctggccccagctctcaggctgcctgctggatgaccctgggccaatgccttccctctctgggcccctttctcttcatctktaaaatgagagagttgaactggataatttctagggcccttccaaccttaagtaagagtctatgatggaggagaaaggtagccaaggagtattttggtcctgatattataggacagatgaagtttggagtgtcctgaaaaccactaaaaaggagtctctgtttgtggccacctagtcattacccctgactcacctcaccctgtgagggactgattcaggcttctgtccctcttctgttttccccagggacctctttctgctgcattccaatctacccccacaaacagtgcttcctgttggcatcctgaaggcgcaggctgctgggcctctgggcctcagatgggtgactgaggccatcccagagtaaacacaggggcctcagccactgctattatgaagcatataccacctgggtgggtcagagctgggaatgcttattgtacagcaggtcacgggctgggccaccagcagaagagtcacctttgctgtgagaatttaaatccatccttctatgtatcaaaattctttgaacatctactgtgtgccaggctttggggttcagggcaggcaacatattctctctaactatagctctcaaaccttcgacccgcagtaaggaatgttttacatcatgacccaggatacacacaggtgcacacgtgtgatgtatgtatctttgtacatgcaacaatctatgacattttcttctttttttttttttttttttttgagacrgagtctcactctgtcacctaggctgragtgcagtggtatgatcttggctcactgcaacctctgcctcccaggttcaagtgattctcctgtgtcagcctcccgagtagctgggactacaggcacacaccaccacaccsagctaatttctgtatttttagtagagatggggtttcaccatgttrgctgggctggtctcgaactcctgacctcaggtgatccdcctgcctcggcttcccaaagtgctgggattataggcatgagccactgcgctcggcccgatattttctatcctatttattttttaagatgctggttgctaggcactaaattgatttcacaaccttttcaaaggtgggaccagctgttggtggaccattgttctaggcagccttccctgaccatctcttctgtcctccactccactgctttgcctgggttgggygtccctcctctgtgctttccaagcctacctcttagcacttagccatggacagtagaagtatctttattagcctatctcccccacaagtctgggagcagcttgagggcagggaccacgtgactatgtctgattcatcactgtgttcccagcatctcacatgagtcccatgagttggagctgattaaatgtttgtaaaagacaaagcatgcaggcaggcagagcacctgctcctaggtccctcgtattgttcaactaatcacaccaaattcaatacctggcacatgatagacaacttatgattttgaataataaaaacaatccattatatttttatgcacatccaagttttcaaagcagtttaacatctgtcagaggtcttaacccagtggctctcaggacaaatctggttgcagtttttgtttggttggtccaattcttgaagctgcttgggttcgagcacctaggtggggccatgcactgcccagatccctcccactcccttctgtgtgacyctagcagcatcagtcatttctggtacccgccttaaagcctttgagctccgggtccttccatctcagacttctcatgcatccagtgagctgggaatgggctcatcctgagattgggaaactaggtcttggagcgatgaatgacagacatgtgatagtgaagctggaactcaarcccactcccatcttaccacagcccagtggtctctccgctaccctctactgctgcttacattgggaccataaagccttaaatgatagcaactgtagacagttattacatattctaatcaatactgcaaacacaaaacaaaagagagactgagttaggatctcttgccccacagaggctggggagctgagagaggtgagmgagatggcgtggtgtggtggttaaaagcctggggcctggaatccatgcctcaggctggcctctagtcctagatctaccactgaccagctctgtgatcatgaataggttacttttccccttggagcctcagtctcctcatctgtaaaaggggcattgtggtagtacctattggagaaattatggttagaaaaaaagattaagtattcaaaatacataggacagcacctggcccaagacaggtgtcstgtgactggtacttgtggctgttatcattatgatgattattgactcaggctggagagaaagaagtgagttagagcctgggatttgttaagctttctctaggtgcctgagaggagtctctagggagacagatgtgcctggatatgctgtctttctgcctcctcaatggttttgcttggaaaatgaggtgctgctgaaactttgggatctgcaaatgcttgattatggcattcagagccccagcctaactttgaaggtctaccttccatcctgctgtctcttctgccccatgttctagtcaaacaggactagctggcattcattgataaacacaaccagcacttcctactgcctattctcacctcatgtattgccccagcacagaatgcctttccctcttttctccgcccatctcagtcctcctcatctgtcaatgcttagcacataacagaaggccatgaagtctttgcctgcaaccctcaaacaagggcatgtggctttgcctgtgcatccacagctcagctgggaaaggaaagcttattgtggaggatccttgctaggctctgtgccaagcactttaacagcttaccttggccatgtgcagtggctcacgcctgtaatcccagcacttcgggaggctgaggctggcagatcacctgaggtcaggagttcaagaccagcctggtcaacatggtgaaaccctgtctctactgaaaatacaaaaattagctgggcatggtggcgcacacctgtagtcccagctactcgggaggctgaggcaggagaatygcttgaacctgggaggcagaggctgcagtgagctgagatcgtgccactgcactccagcctggatgacagagcaagactcagtctcaaaaaccaacaaaaaaacagcttacctcgcatggtcttccctgccaccccaagtgggtaatttgcatgagacacagtttgcagtttgcaatgaagacacttggtctcaggttaaaaacttgctcgtgtcacacaactagtgatacagtcagattcaagtcccaatcttcccaaagcctgtccttttcattcttcttgccagcgtcatggttctggtttattctgtattcctctatctcctctctagataggggcatgtctgatttatagttgttcccccaccaagcacagttcctggcacccagtgggagctcagtaaggttcccaagtgaatgaaaaggtccatcttagagctttaagacaaaaacaccacagtcctcacaatcagatgctacttcatttgaaaaagggtcctttatacactgtgagctaataaagaagcatttggagctatttgggcaaatggcctttaccatgatgggaaactggtagactaactctagcccttccccctcctacacgtccctgtcattcctcttaggaaggataagctagagcctcgctggcagtttgtaygagtatctctttcatggggctgttgcttgcctcagtgttactagtagtaatcatctgcaaaataactgtaccactaatctttactccctcctcccaattaatgataccccatgcgagtgtctcagatgaaagacacattattaatattcaaagaaaaaaccctcgtaaccattttaacatatacaactaacaatgaactaaatttgctttgtggaagacagagagtgagcatcccaaattagtttatgtaaaagctgaaattcttccccgaaaggtctcagtaccatcctcaaagaatatcctgatcatcagaaatgccgtcaagattcccgccaacattatcccctttgttgtctgaaatgtcgaatcaagcacatctggcaaatgtcctagagctcacaaatctttcaaacagcgtataattcccaatggttaaagagataacgccaccgcttaatcgtgctgctcttcaaaatagcaccaactttccttcaatcagaaacaatggctttggcttcttaaaaatatcacacaccagtgattatttgcagagagggcccttttgcatttgaacctgtgggttccagacagaatttaaaatcaaaaccacaagcctcatttgaatgcacactccattaaatggacaatgggaataaggggtgtgaattggggtctgaaaagtaacctggcttatgtgactcggctgccaccaccagaatcatgaggaagatggcgatgatggtggtggtgagagctaaccatgactgagcttttgccatgcaccagaccctcaaccaaggggtagggagtactcatgtggtccctgtttgacaatgaggaaacaggctcagtggggttaaggaatttccccaggaaatttggcaggagcccgaattcacactcaggctcgcctgcctccccaggtttcccgctttccatttctggccagctccaagatcatctgttgaaaaaggcatgggtgaaaagctcccagacatgatgtttatctgctccccacccagctttagaaaagggcgaaatttaagccgcacagtgaacacctagagaagaaagatcacttttgtcttctaaattttctctggtgttttttagacagttgaaaactggaaacatcctcagtgtccaataggagaggactgattaaataacatatagtttattcttactacagaatacaatgcaatcattaaaaatggcagcgaagaactagatctactgatatacaaaggtatccatattttatttcaggtgataaagcaggataataataatagccagcatttgccaactgcttactgtgttccaggcactggtctaagccctttacatatattttattttatttcattttatttaatctccacagtaaccctgcaaagtcattatccttgttattcccactttacagatgatgaaactgaggcaatgtgaaatgcctgcccaaagtcaaactgatagcaagtggcagagctggaattggaagccaggtccagctgacttcaaagctaaagacaatgttagagctgactttgaatgagaagttggagtttactagtgmaagaaagaaagaaccgagggcctgcctagcagccctatattttatagagatataaaaagtatacatccaaagagtgtaaggttgcagatgactattcccaagacagttctctgcccactttcttgctcaaactttggccaatgaacaagtctttcttttttttttctttgagacggagtctcgctctttcactcaggctggggtgcagtggcacaatctcgsctcactgcaagctctgcctcctgggttcacgccattctcctgcctcagcctcccaagtagctgggactacaggcgcccaccaccatgttcagataattttttgtatttttttttgagacagagtcttgctctgtcacccaggctggagtgcagtggyrcratctcggctcactgcaagctcygcctcccgggttcacgccattctcctgcctcagcctcccgagtagctgggactacaggcgcccaccaccatgcctggctaattttttttttgtatttttagtagagtcggggtttcaccatgtagccaggatggtctcgatctcctgacctcgtgatctgccctccttggcctcccaaagtgctgggattacaggcgtgagccactgcaactggccaattttttgtatttttagtagagatggggtttcaccgtgttagccaggatggtctcgatctcctgacctcgtgatccgccygcctcggcctcccaaagtgctgggattacaggcatgagccactgcgcctggccaatgaacaagtgtttcagtgccactgacaaaccaagactcccctaatcttgaagccactgccttcccctgacagatgagaaatctgagacccagagagggcaaatcacatgtccaaccccacacagactgtctgtggtagagccagggctggtaccctggtttcccactgctggccggaactccttctgcaaacccaggctaccttgccacagtgctttccttgcagtttctgcaaaatggccgagtgagactcccccacagcctcctcccgctgtcatccctccagcgagacaaaaggcaatttaccgaaatgttataatcacctggaggctggcacgcggggacatccatgctttatctgcggtgttgttagcagcaccrtaatgaaggctttgtggagggataatacgctgtaactgccaaatcaaatgcccgcaccaatcacacatccctgccagcagacgcgcatttgctgtaagcaaaaggggtaggaaagaaagttatgagtattgaacgcctccatggtgccagggacttaccacatcccagttctttgaggaatagaccattattcgtatttggcagatgcrgaaactgaggctctgggagtaagttatttactgacaatcaagcagctagtaaagggaggaaccagggtatgaacccaggtccctctgacaccagaggccatgctctgaactgatgaaatatgctgtggccttttctgaaccatgaacctgtctgagaatctaggcccagctacggacctctccccagagaaatacacttgaattcacaaacagaattttgcctacagagggcgggattggccacttggaagccatccatacagccctgtcaggacctttgctctaggaataacagcctacccagcttgccgcctctccctggactgcaggaattgcccattgccatcctctctccccaccccagttccaaaggccctggaaattccccttccagccatggtgcccatcagattctggtaacaattcctcccctgccgccccccgactcccccayggcagcctcctggaggcattcgaaggacacagcttccccttcagtagctggagtcaacctggrccagcactgtaatggtttgttttgtctcctttaatagaagtgagtggaaagccagaccctatgaggccggagcctactctctttctcagcccaagctctggaactcagcactgttgactgaaacccctcaggtccaggagaggcggacagggtcacaggcaggtatttagagccagccagatctgcaagcagatcccaactctgccactcaccagctgtgtgaccttgagctaggcccttaacttctctgagcttcagtttcttcacctgaaaaaatggggacagaaatagaccccccttccagggctgkggcctgaagtgagatgacatgcatgaggtgagatgacacactccagcaagaacagcggctggccctaaagaagcacctttcggtgcatgttgacaatcacagtcgtgatccttttacacccagggtgaaaaggtgaaaagcaggggcctccttaactccacatcccaaagggaggagccagygttaccatggcaaactgaagtctggcctcctcccatctgcttttaattctaatttcaagactrgactagaggtctgtggttttctgatctctctacccagcccctggcattctgttacggacgtgtccccatcatcctcatcgtttcttatgcacctagagccttaggccccctaagctccccctagacacaggcctttgttgagyccctgcatccaccagggtttcacttggggatcagacccagggcctggcccccaccaaaaccagtgcagggctagagggaacatatacataaatagacagtcacaggactggggtgggtgttctctggatagaggcctgggccctttagggagcctaaatgttcaagagactgtgaagaaactcccacccctcgaaatatagcttaggaatcaaaataacataaaccaaaaaaaagcacaggaagcagtccaacacaattctgtattccctacgatgtttaattttaaatatcaaatatgagattctttccagaaaactgggagtatccctatttcagtggtgccaggagctacattcacagtgtgctacacacacagagaagagcatcagtgtgtcccaagctatccagatgatgtcctggaaaaggtggagtttggctaggcctaaaaggatgagaggtggattctgctgcatggaagggaaggagcaatatgggcaaaggtccagagagatgcaggggtacagggtgctccagatggagcagctgaaaaggcttgtgtgttggggaatggggaaggtgtcaaggaggcctcagactggactttgatgattatggaggagtaggtctcagtgaggcattcaaggcagagggacccagtgtgggctggagagagccttgaatagcaggttagggagtttagcttcagtccttcagacggtgaggagtaaagacgggagttgcagaaaagttcctcagggaagtgggtagcggtcaaggctgcagctctgaagacagacttggctatcactctgcacccactcacatgagctgggtaagctcgggaagacaccttcacctctgagcctcagtagcctcccctgtaaaagaggtaatgacattgtctttccacgactgctgtgagtattcaatgagttctggtctgtcacagacttctgcagattcctgcctaacacccctgctgactgttgccactgctctagtcttaattcagccttcaacatttgccaactggacaacaggctcccgcctgccggggccccttcggtccatcgtccacttgcagccagggattaggggccaaaagaagcagagggtcaacgcagaggctgtggggtcaggccaacagagtgaccttggccatggcacttggttcctctgaactgccttaggacagcagctaggcatcatgaacatgtttagtgaacatggattcaattataagtgctcaaaaagaaaagggggcaccaggaagcaggaggaacagcaacatcaacagtgttggtgattttgcatcccctctccattcagcacacatgcrttctgcagtgaatgtgaggacactgcatcagtcctctccatccctgtgtgcctcctgtccggggagcaccttgctacagaggatgattctagcatttaaagatatgtacctggacacggtggctcaaatctgtaatcctagctctttgggaggctgaggtgggtgggtcacttgaggtcaggagttcaagacaagcttggccaacatggtgaaaccccgtctctactaaaaatacaaaaattagcccggtgtggtggcgggtgcctgtaatcccagctacttgggaggctgagacaggagaatcacttgaacctgggaaatggaggttgcagtgagccaagatcacgccactgcactccagcctgggtgacagagcgagactccatctggaggaaaaaaaaaaaaagatatgtatgttttgatcagtgtcacccataaacactactcatatgcatctggacctcaacagcaagacaaactctctaacaattgtcagaagactggctatgtgggccaggcttggtgtgcctgtaatcccagcaccttgggaggctaaagtgggaggattgcttgaagccaggagtttaagaccagcctggacaacaatccaagaccccatatctacaaaaaaaagattttttwaaattagccaggggtggtggcacacctggagttcagctactgggaagctgaggtaggaggatctcttgaacccaggagttcagaggctgaagtgagccatgatcacacygtgcactacagcttgggtgacagaatgagaccccctgtctataaaaattttttttctttttttattttgagacagagtcttgctctgtcgcccaggctggagtgcagtggcatgatctcggctcactgcaagctccacctcctgggttcacgccattctcctgcctcagcctcctgagtagctgggaccacaggtgcccgccaccacgcctggctagttttttgtatttttagtagagacggggtttcaccatgttagacaggatggtctcgatctcctgacctcgtgatctgcctgcctcggcctcccaaagtgctaggattacaggcgtgagccaccgcacccggcctataaaaagtttttaaaaataagaagtctggctgtgtggcacttagtgagatgtccatctccagcatgggaccttcctaagagatttccaagggtcattatgactatgggaacttttcccctcacccatcaactgaagcacctacggctcccacctgagacaacaccagctgtccatacacagagatgttaatgaggattgcatgatggcaggcatgcaaagtgccaggcatggccccttgcacacggaagtgcttcctaatatgaggcagctatattccttgccctgacttagccccatcccagggatagtcctaaatccagccttaggcctaactttggagaccccacctcaattatttccacatattaaaacaaagtgtatccacatgaaatataaatcccacattaaatataaaaattttgctgttgcttggtaaactgctttactacgagtctttaacaattggccatgatttcctgagagtcatgcatactggagaattctcgaaaaatgaggaaattgagcctacaattggatttcaagtgtaataaaattgttttgatttctaaatttaataattaagtctgaatgcattaattataacatttattaatttcagttttgtagtttctctttttttctgtttagagccaatcatctttttctaagccttttacatttgaataggccttgagaagcttgtgggtgcttggcccagccctccacccagcccagaagatgctcttctatggggaaaagccggagcaggcccaaggccttccacctccccgccctgtggcaggctttgcctaggcaatgactcctcagtcartattgacaatgctgtggccttggcctctggccaccactgccagcaaagttcaaagcctctttcttgtcaggagtggtgatggggatgcctgggcattgctgccctcactgtggcactgccatggccctgccccaccagctcacgtaggctgcatttgcacagagggtgtggcagggcggtgaatgggacccataggtgcccacaagctggggagcctgctttgcagtgcaccccccatcccagcctggagtcctctgaggatgggcctagacccccccaaaagacgacagcccctatgacagaagcktccttcctccaggtcctggtccagccctgtgctcactgccaccctggcattcggcataagccctgggctgtctctgtgggttggaagtgcctctgctcyctgcacgtgatgacacacactgagactttagggactcacatcctgccacactcagccagtcacatgagccacacaccatgtgcacgcctcccctcagctgcagccactcccacactcacgcacacatctcttcaygcttatgctggtgtgagagcagttggatgggaatacacacacacctgtgtctgtgcacacactcgcagcttcactgagcgtaactctggtgccagacacactgagcccttccctctgccctgatggaaggaattggggcaaatcatttctcccatcagtttcctcatcttaagtggagacagccccatctcactcactgaggagaggacgagtgtagcccccacatacacgcggagctgggcacctcctaagtgcccggccattgtgagctctgccactctcccaaggcagacgctttgtttcatcttggtctcttcccttccctactccccataccagccccctcactcacacaggatggaagctgcatagcagcggtgaccgcaggtgtgcgcagcccaaaggcgtgcgaagagcaggcagagcccagcctgtgggtgtgcagtgaccccaatccgcctgcttgccttccctgggctcgcctgccctggcttgccctgctggctttgaacaaaaattattagctgagctgtggcccttgatcctagggcactgatcctcgtgtgaagacctcctcctcccgcaggctccccctccatcctggcagggaaccagaagtcctgggagtgtcctgagcgagtcccttaaggacgctcccttacaggcatccattttgggaatgaaagacctatcacaatggtgattgtagcttccattcctgggtgcccaccaagggccgttcatcctggtcagtcctcactctgccctctgcagaaagtctggtgaaacctgctacaaagacgaggagggtggctcagagatgggagtgacgtgtccaaaatcacccagcgagtcggtggctcagcatcggatccaggcttgttcggctccagaactccttctagtctttgctgtgttgccacatgagccctgaagtcctaccctcacaagttaacttctggcgtttcttttggtttttggcatttcctgtgccccaagtgctgtgctaaccttttttaggaatgatctcacttggtcctcatgcaagccttcaagacaggcatctttgtagatgaggaaatgagacctagggaggtgtgaggccactcgctcaaggtctgtgggctagtgacagarttccagtgcccaagctcttaaccatcatgccacactgccccctccctgcgaatcctctgaagagctgatrtttccttgcagctgttctgagactttcaggatctctttttcccccagctgtgcactgacctgcaggctgcactaatgtcacctggtgacctgggcacagctcagcagacccggcacagctgtgccctgtacaggtcagctcctccctgccttcactgagaggcaagtcccaggccagccaggctttgagcttcctgagtggggttagtgcccaggtatgaccccacacaacccagcctctccatgtggtagggctgcccaatctattgccccaaatcacaaaaggaaccagcagctggcggtcttggacttgcccttggcgtgcctgccttgccctctcacaagctcygtttgcccagggtggggaagaaattcctccccctttgtcaaaaccccacagggtaaacctgttgcttttatgtccccaaatttacatttctttattcattattcaccasgtacttatgaaatactttaagtgctagatctgtgctgggccctgaccatcaaaagtaaatggtacaggctggagggggtgactacaacgaacactgtgacttcggctcagggaaggctaacatccgggcagggtctgtgggggtaggggacagccaagagagtatgaagcccagcccacacattcatggggcctttaagtatggattgtgaccctgttcatcagacaactcaaaattcacaccccctttcctgaccatagtgcctcagcacactatgaacttatacatttttggaagaaatcctagaataatacactcatattacatttggttgtttgtgttaaaagcagcaatttgtccgccgggcgccgtggctcacacctataatcccagcactgtgggaagccaaggcgggtggatcgtgaggtcaagagatcgagaacatcctggccaacatggtgaaatcccatctctactaaaaatacaaaaattagctgggcgtggtggcgcatgcctgtagtcccagctactcaggagactgaggcaggagaatcgcttgaacccgggaggcgggggttgcagtgaaccaagattgcgccactgcactccagcctggcgacagagcgagactccgtctcaaaaaagaaaaaaaagtaatttgtcaaatgtaaatgtttaaactatactgtaattgttakcaccttgcttaggcctgttttcaattttatatacactaatactacaaaatggaaagtaccttgggtctctgttgtgttctgagaggccctgaacccaaaccaggtcctgaaggaggaagggtggtcccttgggaatagcaagtgcaaaggcacagaggcactggcgagcatgcacgtggactactgcagttcctccggtggctgcattttacagtgcgaggggagctgggagggaagcggggagggaagcaggcctgggaagcaggggaacctggcgaccttgaaggccaggctgaggagtggagagccttctcagggaagtttttcactggggtagcccatggtcagatttggggtgtctcttgcaatatgtttcttttcttctctataaaaagcccagttatcccaatgacctatgagggcagggcatgcaggtggcagcgaggtcacttccaaagcttcagaaccggaataaagacatctttcggccccaaagatagacctaaacctgaagtgcacctgggtcctggcagcgctcactgctggtctcagtcccacctgtccctaacactggccacatggctggccacaggattgggcttgccaattcattcattaattcaaaagctatcaactgagaacctactatgtgccagacactcccctaagcactgggatatcatagtgaacaagcaggcagggctcctggtctcactggagcttacagtctggatagggagacagacaacatgcacgtaaacaaatacatatgcagggagtggcttatgctatggagaaaataaaatgaagacaagatggggtgactgtgagtggaggcggttagattagggtcattgagaaggtgacatttgagttgagacctggatgccgagaagggggtgcatagggaatatttgttgatggcaattgacacaagtcagaatgaaaaaggcttattccagacttcatctgggagagtatttattaagcacctactgtatgctgggtctagtggtcaacaaatcaaacatggtccctgcattgagagcttacagtctaatgggagagaaaaacattatataaaaaaatatgcaagccgggcrcggtggaccacacctgtaatcccaacactttaagaggccgaggtgggcggatcacctgaggycaggagtttgaaaccagcctggccaacatggtgaaaccccatctctaccaamaatacaaaaattagccaggtgtggtggcacgggcctgtgatcccagctactcgggaggctgaagcaggggaattgcttgaacctgggagttggaggctgcagtgagcygagatcgcgccattgccctccagcctgggygacagagcaaaaactccatctcaaaaaaaaaaaaaaggcaaataagtatagattcaaaaattgtgatctgaggggaccatgaaagaaaagggagtgaatgacatcaatctggatgtctgggtctgtgaagggatgtccactcctcttagagaacatgaggatctcaccttttagggagcacactgggttttcatgtatttcttaaactgtttatttgaaagcagttaaattaagagaattctcgcaargatagtacagagttgwcaatgtaccccacgctcaatttccctgttatgactgtcttacattggatggtacatctgtcacagttagtgaactaatattgatgttatgattcactaaagcccatactttttacagatgccttttcctaatgtccattttctgttgcaggatcccatcctgtctccttaggctccactgggggatagctgtttcttaggctttccttggttttggtgacagttttggggagtaycggtcagatattttgtaggatgcccctcaactggaatctgtctgatgttttttctcatgattagattggagttgtgggtttgggaggaagatcacagaagtaaagtgtcattttcatcccatcctatcaagggtccagactgtcaccacgacttaccaatgttgctgttaacattgatcacctggctgaggtagtgtttgtgaggtttctccattataaagttactttcccctgctccctttccatactgtactctttgaaagtcactatgcacagccacgcttcagaagtggggatttttgctgcaacgctttgagggcagagtacataaattacttggaattctcctgcacggatttgtctattctgatttttatgcatttttaccagtatctttatgcaaggtctttttgcttttcaggagttcaagaaccctgttggtatttctaggaacctagaaattttgttttatatttatttatttatttatttatttatttatttatttagagacaggttctcaactctgtcacccaggcaatcacagctcaccgcagcctcaaccaccccaggctcaggtgatcstctcacatcaacctcccgagtagctgggaccacaggtgcttgccaccatgcccagctaatttttctattttttgcagagaggaggttttgccatgttgcccaggctggattaaaactcccaggctcaagcagtctgtccacctcagcctcccaaagtgttgggagtacagttatgagccaccacgcccagccaaaatatcttatttcaattaacaaaatgcgtgaarttaccaagacattacattggagggtaggaaaaaagccaataattttttttttttttttgagacagagtcttgctctgtcaccatgctggagggcagtggcgcaatctcggctcactgcaacctctgcctcctgggttcaagtgattctcctgactcagcctcccatgtagctgggactataggcacccaccaccacgcccagctaatttttgtatttttgtagagacagggtttcaccatgttggccaggatggccttgatctcttgacctcgtgatccacccacctcagcctcccaaagtgctgggattacaggcgtragccaccgcgcccggcaaaagccaataattattttaattatttttctattgtcaatacccattagtgaaagaagatttgggaaataaaagcggaaagagaaactctctcatcccactrtgcagggctattattcacatttcaatttatctttaatttttcttctgtgcacagttatgacataggatatactatgtgtacttttatttcttgtctcttcttgccttttttcttttgcttattatcacatcaaaaacatttcccccatgttgctatacaaacttcctaacaattattttcagtagctgctaaatatcccctcaagtgtcttatagtatccacctccccgaatctagcacaatgcctggcacataattatttgttaaatgaatgcatatacaacaaaataatcattccctcatttttagaaatgtacattttcctttttcctgattctaaatagttccgagacaaatagattatccctttaagaatagtgtcccagagtggaattaccgggccaacagggaccaaaaatttttaagataaatgcaccaaaccagaaatcttccttctctctgcaccactggcagttgtgccaagggtaataatttacaattgattaaagagtttgtggggtgtttttcccccatcttttttctccctcctttccctctccccctcctaccaaaaaaggggagaaattatctgagaaggtgaagatattctcagacaatcatattaacatattccaacaatcgcaatttgcaaaatagtaatcacaactcccaggatctgggaggcattaatcaaagctgcaggtttaattccattttaaatattgatgaaatgtgcttcggcaacctcaccctggcgtggcagggccaggggagccgcagagaggcgcaggggaggcggagggaggggttggtgagcagctgctgggaggggaggcatctgtgattcaaattggtggctgtacagccaggtagagagtgaaaggggtagtgaagagggctgttaagtccattgctgtcaatttttaacgatcagggaggggcctgaggactggttcagcacaatacacccagtttgtctggtttcaggggttactgctgaagaggttgcagctgcactgattcgaatagcctggagacttcagaactgtaattatcaaccaggctgctcacagtgtggcaaaagtgggctccaccagcgcttaactccttgtgtgctgacacatcatcgctgctttccccacccctggatttcccagccgcagcagggactcccaggcagcctccccagaggaaactgaggctcactggctgcttgccagagtgtgccaggcagcaagccgttttccttaggtctcatgtaaagaaatggtgggcaggtggttagtgatgtggaggcagcctcagctcctggcgtgctcacatctgccctggggtgagaggtcaggctgcagagcctggtgaaccttggttggaatccactggcgatggacttaggacaaggctctcccctacctgactgggctgttacaaagatccaatgagacacagtgtctgcaaagcaccaagcacacataggctgtctgtgagcctccatctctctgcccctgggtctggtgcctttcacacaaaaggaaggcatccctggcaggggatctgattcaggcaagctttccgccagccctctgtatttcagctctcagggagtgcccttgttcccaagcatctgccatttgtcacccaaggagggtggacacacccatcctcccatctcttaggcaggaggcactgggctagacacagggtaaggagaggaggcaagaactcctccagtactctggccctcaggagaactggttaaaggcaggtagtggcaccaagggaagggaggagtggcaggaaggtggagaggcaggaaggcagggagaaggcagcgtggtgtgaaaaaagcatgggcagctggaaggacggtgcaggaaggatgagcaggactcgttgaccctcctcctggaaggaacrtaaccccagagacattctccacgtatctgtgaaggagtgtggccaagaaygcttgtcccagcattgttcctggtagtgggagttgcaggcaacctccgcgtccaccaccggcatggagaggaaaatgtgacggaagccaagcatggaatattaggcaacagtaagaagcaaagagctggatgtacacacagcaacaagaatagatcttgagtgaaagctgtgagacataatgaaagccacagcacaatgccatttctgtaaattaaaaacacatttgtacacaaaacaacagcacatattttacagagcaacatgcattttgaggggtctctatcccaccattggtgtaggtccctgcagtggtggaggaggggcccrgtatgggtttggaggagaaaggaggaaaaatgaaaataaagtaaatccacggaggggtcttgcacagagagatgatggcagcgtgctgtggactgaatgtgattcactcaagtctctttatttgaggtttaaaaaacagcacaggctttatagctggacaatcctaggttctagtctgagctctcccacatactgaccctgtggctgtggacaagtgcctcggcctctgtgagcctctgtttgttcatctgtaaaacggtggtgaaggcttgcccattgcgtggttggtcacgaagattaaactaaggagacactgcgtttagggctttcaggcacagcggcgagctcctgcccctctccgttccccactgaaaggcctggagtaaacaagagggtgttagtcccctggagaaaccatgggttcttgaaagggtcaagaatggagagcctagaaaggaaatgaagatctcaggactctgtctcctagcaccaccggcaaggcctagacccactgtcctggggctgtcgtgcgtgggctgtcagaccaggcaagtgcccgactgtgaagcagctgctctctgcctgtcaggatgagtccagcttagggtggccagactcctcatgcttgcctccgccagcagcacccacagttagaaacccttctgtgttcaatttccccaagaccagccactccgaggaattcagtgtaaatgaaaggtctgttcctccccacacaaaactacacagactggccatcgacggaccatcccagtcccaacgccccacctggggaaccccccaggccaggaaaggtcccagcgagcaccaagcatgaccagctcttcctctttccttgcagatgatgacgagcatgagtggatcacccgtacctgtcgaaagggctaggatgagatcgtgggtcacaggcccgagccgtgaactctgtggctgcctccaccagaggtttccatctrccctactagcattggctgccctgggggacgggctgtagttctagaacctgattttaactcaggaataaagactttctgcggtcagtggccccaggtgtattttccttaaaagattgttcctcagtgggcatcatttaacctggacaaaattgtgagctatagatattcccaggccccaccctagacctcccaatcagaatctctgggaatggggcctagtaatttgcattcccagcatttctcatgcatctgaacgtttgagaaccatctctttataataatagatagatgtaattgagcactaaccggcgcaggtagtgcgtgtgcattatctctgctcctcacaacagccttgcaaggggaaggcttttgcagatggggaatctgaggttcagagagacagagtgacttgcttggtctcagagggcagtaggacctgatcactgtgcccagtcctgcagcagtcatgggttcttagtttctgtttctggttgggccagtgaagccccttcctcatccctcttttctgcttatcactagagacagaaactaaaaaccatggcttcaggctgctgaaagcctaaaacaaaacagaacagaaaaacaacaacaacaaaataaggtgggttggacaagcttgttaggcccaagaatgattactcaggcctgtctttccctcttgccagctcccccatttgaacctcacatcctaagcacagaatcagcatggtgccatagaaagaatgtggctttggaggctgggtgtgatggctcacgcctataatcccagcactttgggaggccgaggccggcagatcacatgaggccaggagttcgagaccagcctggccgacatggtgaaaccccatctctactaaaaatacaaaaattagccgggcatggtggcatgcgtctgtattcccagctacttgggaggcagaggcatgagaattgcttgaacatgggaggtggaggttgcagtgagccaagatttcaccactgtactccagcctgggtgacagagtgaaactctgtctaaaaaaaaaaaagaatgtggctttggcatcatataaaaaatggttataataatgctttaaaacaatacagtagccgtgtggttaaatgagataatacaagtaggggacctggcgcatagtaggtattcaatatgtgtttgctttaaagaacaacttgttagtggtgcatataatcattcctcaaaatcatcccagaggtcacatttgtcagctaaaaatcagaagaggaagcgacaacatgttccagggccacatatgggccatatgcatcctggatctttgtctaactgttcctccttagaggttgctagatcctgttaccccctatgctctgtcccctggctcaccagggctgcccagtggaggcagaacagtgagtcaggcttggaaggcaggagaggaaattggatctcaaactagggacccagaggcgtcatgctggggcagagccaggagtcagcgggaagggaggcctgggctcactctcagctgcgctagggagcagacttgggaggatcacctctccccaagacgccagtcaccttggtagatagggttgtgctccaccggtggtttccaaactgtattttgaaaacagaaggtacattcatgtaaagaaacacacaactaaactcatatattttcaaagatacacatatatctaaacacttgaaaatggattggaagagcagatgtatgaggagcagaaatggaatcagggatgggagatttaaaaactagtagaatagagagaggggccctgcagtcagtgactcatgtgcaccatgagctgaggtttctgagcaactcatttctgtgcagggccacagcaggccagggaagcctctgcattctgcagggcagctgtgctctccacaccaggagctttggcttgagcaaatgactctgctgctgaaagaaatttgacaaccaccaaaaagatgcgctctctcactcctcaggttatgaggtggtggctctggagcctgacaaaaccactataagacccagtcttgtgcagaacctggggccctgctgcccgttccatattcccttaacttcaccttattaaattcttccccatcttccaaacacgctcctctgcacctccctccctgccccaccctcttgcttacctattctgtgaccttctcatctgataggatccagctttaacacccacccccttggctcccacagtatttgccagactgagagctcctccaggacaaggtctggctgggagccttttctcagtgtgcagagccagcacagggcccagcagagagtgtatgttcagagactggaacagagggcatcaagcagcctgatttcctccaaagcttagataagaagcaggtgtgactgagtacttacagaagaaacccatcgtcaggcctccacaatccattgtttactaactgggaaatggtacccgtttcccaggaaggaggattacactgtccagcagcccacatattctgggagccagggacctaagcccttcaccagagagcaggaaagaaatggaatcccatcatgttctggatttcagtgccagcacttctacttgcattaactttattacacaaataagacatttacaaagcacgacatgaaaggtatgtaacaaaacagacattggttttacaaaaaaagtgcttacaattttttttccgtgtgtgtgttttcccctttttttgtatttaaataaatagtcttgatggcctgtacgttcccaggctgctcttaacagggtagtggagacatgtttgaactgtaacatgctacggccacataatccacgcaaggaatagaccctgaggagaggctcaaggcagagtgtgttgggtgaccctgggtagggcttggttggccacttaccacatggttgccactggggccttgatgatcaggagcaaaaatcaaaggaaagatttgagctccaaggccaggaattgggccctggttgctcctgttaatgtcagcgcctagcacagggctgggcacaagttaccactgactgagtgctgagctgagctgtactcaccacgttctgagtggtgcctgctctttgccctcagtcagctgtcactgtctttggaagggagaggaagcaggttcccttcttaggctgcacctgtgcctaccctgcctgtagatcccagagcaagaatgacctataggctttcatgttaagtgccaacgtcaagcatttgaactctgaaaccttatccagactcagtgaaatagagctgccattgattagcaatgtctgccatgggtaaaaacagagacaatggctgcgtatgtaccatgaacttgctttccctgtcttagagtctccttccaaaagcaacataacaggttaaccacagcaggaaggcggacttgggctaaaacatgctgattagcaacctctagtggaaaatgcatcaggacaccaggtaattctagaattacaggataagcttgggacaaatgggcatcccctgaaaacataaatcatggtcgtgtgtagcctgagcccttttgtttggggtggaagagttgtagcaggatggatgttacgcagctgtgtctgacctctgttctcaggggtgggtggggctggctccaggaagtattgattgggaagctcagaggcaccagttggaatcctgagcttggcacactcacctaggcaatgggcaccctctctctacttagagatggatccagggttaacattctgactgccatttcactgggctctgttccctctcccctataagggattccccttccattgagaagacctggcccaagcaccactatgagaggtcaacaagtggccaacaggggtccccaactctaacctgtccaaacattcagaagagtcatggcacagatcgaataccatcgctgctatgtttcttacatatatgctggataattaggtgggggtagggtctctccctgaccccagagttttctctttcctctccttaaaatggctagtgcctcttctggtccaatatgtcaccgccctctccttgatttccaaaccaatgggggtctttcttctccccattccctgtctatccccgctgcctcctagtctgggcaggcctccatctctgccctattaggcytctcagggttggtcactgtctcttctctttctgaattaacttgacataaccagacagatggaaatgataaaattagaacatagctttcctttggggacatcccacaaacactgtagagttttccagacaaaagcaacagagtggataacattgggggttgtcagctattcagaattcagagatggttccaaggaagtagtaaataaaggccaatgtgggggaaaaaaacctgtaaatgagaaggccgttggcatcgcacaattcaattccgccttttgttattgtaatcagctgaagttgaagaggactcctgtttaaatgggaaaaacaggctgtttccaccctgattccagatttcagggagttctgccttccaagaggaggactctgtggtgctcctggtgggttctggttctcagcaggagagggaaaggccaggcctcgggaaccgacctggtggtgggcaggatggcggacgggggtggatgcggaggtgggtggactcctggccgcagcttggacactggatctcagcggctgargggcagctgtggggcgcccacgggcagatgcggaagtgccggcagcgttagtactgaaaaaggatgacctgcaagaggagggcatgggaggtggctgagctgggggcctgccccaccctgctgccccccagagaacctcaaaggcacagagaagaagggtggactcagggcccagatctgagtttaaatcctggctctgtcaactgacttgctgtgggaccttgggcaactcactgcacctctctgagcctgtttcctcatctttaaaacaaggatgacaaaatctctctctgagaatcagagagattcaatgagatacaacagcagcagcaaaagccttctgggcatttcaccctgcaccttctgtgcctgatttcacggaagccgcaccatagccccgtgagggagttccaacgttctgttttacaaggagggcactcaggctcaaagaggtggaagcgagtgagctcgtgggcacacagcgaggaggaggacctggcactggaggccaggcctggctcacagcaagctctccctaccaaagcacattgcctctacctttccaaggtcaccgtgaccatagtggctgactgcttattacccacagggccacgggctaagcacttcacatgcgcttaatcttcacatgcacgaagcctagaagtgcgtggctcagacacactgggtgcccgatacacagtgggagatcaggactgtctgtccctttccccctcccactcccacctctagcacttggttgacatctcactgctgctgacacagcyagttccctgaagttcaggtcaaggatcactggctggctggtcaatggcaatgtgtcatttcacagtaaagtgtgaggggcatctggtgggcatgactacatggctgttcccttttctgatcaggaatgttacttgcccagaactggttatcacaaggaggtgatggaggaaagcaatgatgatgatcaccataatagtgatcatgatcataaccaacacctgggggcattttctgtgcaccaggctctgtgctgggctccttacacacattatgcatttattctctgcagcaaccctacggagtgggaactattattatccccagtttgcagatgtagaaaccgcagctcagagaaactaattgcattcccagatctcacaggggaggtggcagagctgggattccgagctggcctaactccagagtggccagggtgggcattccttccccaccctggccactgctccactttggcctccagaatgcctggcttttagcccttattaggaaaagctctctcaagagtggcgaccctggtaggacccttcccctccatgggtctcagtctcctccactgatcaatgacagc

SEQ ID NO: 95448 - DNA, 116748 bp, Homo sapiens
  misc_feature (1)...(116748): n = A,T,C or G
attaaaacagcttatttgactagtcatttccttactatttatcttagaaagatctcctgtggtttatagctgtgttaccaagcccgggaggtaaagtttgcctagaaccacttttggaacacttgtactggattccgttcacagtgaggcagactggcaaggaatactagagactgaaaaaagacttatcccacagagctttggatagagaaccacagcagcactgcaattaagacctacagcatttgcaaaatttaaatttcactttttctttaaattttgtagagatggagtcttgctatgttgcctagactggtcttgaactcctggcctcaggcgatcctcccaccttggcccctttaagtgctgggattacaggcatgagccaccatactcggcttcaaccttactcttgtactttccgtatggaaggaaaattatcattatcatgcctacctaaataattcagtcttagccagtttaaaagggaagccagaggaaatataaccttactctcacatgataaaattaagcagtaataggacaattttttttttttctcctgagatggggtcttactctgtcacctaggctggggtgcagtagtgtgatctcggctcactacaacctctgctgcctgggttcaagtgattctcctgcctcagcctcctgagtagctggaactacaggctcgtgccaccacacccggctaattttgtatttttagtagagacggagtttcactatgttggccaggctggtctcgaactcctgacctcgtgatccaccctcctcggcctcccaaagtgctgggattacaggcgtgagccacagcacccggctgggacaaattcatgaaaacacattcaagaataaaaatgttctgagacattaaatacttgatctaactactctgattgagttaataaaatacttcactctccagcctggccaacgtggtgaaaccctgtctctactaaaaatacaaaaattagctgggtgtggtggcgggcacctataatcccagctacttgggaggctgaggcagaagaatccgttgaacctgggaggtggaggttgcaataagccgagattgcaccactgcactccagcctgggtgacaaagcgaagacgcctgtctcagaaaaaaacaaacaaacaaaaaacaacaacaaaaaaaacttcactcttggtggaaagagtgtggcttcagacgcagaaaagtgagataagcctcactaaatgaaattcgtctagggaatacctacttaaaagacttcctgcctttgcaccaatatctacaatgctttgtgatttagataataactcagataagtcaatggtacattcagtattgacatcttcaaagggagaattggagatgtgaaacaagcactacttcatttacacattcacaaatctctgattaccagttcccattcaatgcctcaaaaaaaaaaaaaatttcaatgaaatgcacagtctgggcaagtctgaatctcaccaacagctaaagagtccctccttctttctcctttcatctaaagtggaaactgttaattgttacaacttgacaagactttagactcgtctaattaaaaaattcagaggttaggttttagagtttaaaagcccaatctcaggcaaaacagacagcacacttttcccatgcctgaggtttctaataaacaatttcagctttatcaaataagagagcttatcaaattctcactcaacatgcatgtcagcaatcatggttaacaccaatttcatcctaggagtaggacgtaagcccacattttaaatcaagaagtctacaactcagtcctggtatacataccaaacaaacacactaaaaaaatgtaagcaactgggaataactggtaagcaacacaacgtatattcaggcacaaatttctcctaagaatagcaaaagaaatgtgaccagaaatatcttctccaggtggattacaccttataggaagtaaaggctaaaaaccacagacccttagtcacttcataataaaaattttaaagccagcagcaaaacttcctctacgataatcatttttgtcccagcaattttacaagctgggatggggtgccctcctgggcaaaagtatcttgggaatggtaatgggagtttcctacataacttctgaccataaacttaatttgctcagtatcagtcatctgtctaataagtgttcccaaacctgcaattagtacaaatatacagtagacactactccacaaaccgagagatggaacgtgaatggaactgttgagagaccttcggtgaaatttcacttaaaacaaaataaaaagagggctaaaaaaggcaacatcaaacaactggtgggaacacagaacagcccccttttcctctctccagtctggctcctctctcaaacccctgcctcagtcaactgttgcagaacaacagaacgagacccagtagaacaagacgaaatctgggtttgctgccgcagatgtgggatttttgtggagggcagaggtgatttcggccggcagaagatggagtttaaactcttctttgccggattgtcctgggctgagccgctgaggaggatcacgcagcgggcgatcaactcaggtccctccctctcggttcggtctctcccctcctctcatgtccagtaagggggaaaaagcgtacggctttccagctctcagctccttaaaaatgcctttctagtgccaccgcacacaatcctccctctggcagcaaagaattttgcagcgaagggctcgccgatccggagcggagaaatgaaatcggcgcccaagggcaattttaattgtctaacccggcccgatttcctaagaggcagcggcgccgggagggaggagggaagagggaggaggaaggaaggcagctctgagaggcaacagggggcaagcggaggcagagaaaggggatcaaagcggcgagatcccagacggggcccccgaggagcttctgcagaaaggactctggggctgtccccaccgttcccccgagagacgtttgcaaatcatatatgcagccaaaatggcgctgagaataaaaatataatttaaaggcaggtcgccatattgtaaacagagaggcaaagaagaggcggactcgagagacaccctccacgattttttctacagccacaagcgcccggttgccggggtctggaccagggcaactcaggtggccgagggctccacgcacccaccccgaggagatcccggccgggcaggagccccgagggcagcgggcgcgcgggcaggcaagcggcactgggcccggagctcctccccttcctcccccgccactgccggctgtccccggccggctctgtcccggctccccagcgacttccaatcccatatggggttctcttcactcgtcccaacccccacctcggggtccggacccaccgctgctcctccccgctaaactgccagaacccggcggacacctgggggcggggaggtgctcgccccggcagctgcagaaagtcagctagcggctgcaagcgcccgttatttcggcagtcaggggcaggccgggtgaaggaatgcgcagagaagggtccgccaagaagctccaaaagggtccccagaccttaccagcactggaggtggaaggcagccgggcagtggtcgcagcacaggagatctccaccttccttgcagctatcgcagctgtcgtggttggtggccctgccgcttctccggggctccttctcaggcttccgactgcgcttttctgcctcgtccgtcttggggggagccagcagagcttggatttgctgcacacacatacaaacggcgtgtgtgcacactcggagctcccgggcggtccgtcgcccccccggcgcggtttctccgtcacccacccctctccccccttttgtccttcttcctcccatccaggctgctcccagaatctctcagcccccggaaccagggggagcccaccctaaccgcgttcctgcagcacaacaacgagaacagcttcttccaaatggggaggatcaagggtagggggatgggaagagggtgcgcggttcccttcttgccacttccttgtatggacagtgggggactccaaagacccgctcgggagaggcccaaagcccggtacccggacgtgctgggggaagcacaaaggggccaacaagaagggggtggggaggcctgccggtgcaacgagatggagtgggctggcgcctcgggagagcgaatcgagggcggcgggtaggtgaaactgctgcaaacgtcctcggaggctgagctcagccccctaaattgcaaagaggggagggagaggctaggtgaggaagaatccccctccctcggccatctaggcgcttcgagtttaggactggctttgtggggcggagggcggaggttccctcccggcgctggaggaaggagatgaggagggccactcttacctccatcagcccccctgatgtgtccaagtcgtacacgatcgtcttggtctccattttctcccacattcatccacctcccgggctgggtgctctctgctccggcccccccaaccccggggggaggggggaggtgaggggagggggcgctcctgaccccggccccgcttttttcccaatacgggtcccgacttcctcgccctggctcccccccaccccccggcccccagtccccgggacgacagcgtcctcccgacgggccgcgaggggggagcggcccctcagtcccggcccggctgctggctgcacagtgggtcccggctccgggggtcaggcctcggcggggcctagtcccacaggctaaagccggcactggcgacagccggtccggccgggaaggctggcgggcgctgccatcccggggctgggggtatcggagggggggtgagaggttacgtgaggttgtggtacgtgaggtgactggggggagggtgatggggggtggtccccgggctccgcctctcgccgccgccgccgtctgcgtcccggctgccgcgcacttggcgcaaacttaccgcgagcgcccgcaaagccacccgcgcaggcgccccgggatcggcgctcgccgcgcgcaaccgcagtgacagccggcggcctggctcccgcgcagccgcggtgagggagtaccccccagcgcgcagccgcgctggcattcgtctggaggaccgaagccccacctttctgccctgcgccagcgcactgagacaaaagggcgggacctgaggtctcgcgcaggcgcttgagaaagcttgtaggggtcaaggcgcagccgcaggaagctagggactgttcatccattggtgtttgtgtgcaaactaagacgactctgttctgcgcaggcgtgttgggggtgctcccccttcctctccataacacagacgcctcccgcgcaggcgtattgccttccgcaggccctcacaagaaagctgctcctttcgccattttggtaatgggatatgggctatcatgcccttggagtcctcaggcatgaacagaaaggagcaaggtgtggtgttggatggagctggtcgcctgtcggtgacagcagtattcctagggatgttgtacttgaccgtttggttctaccatcgggtgtggctggaccaggccaccatattggtaaagagaaaagccatttgagacagaaaatgacgcttttggaggcgtgtgggatgactgtggttcctaattctctcccgctcctgacagataattttatcagttaattgtatcctcagcatccctgccttgcgtggtggtggcactggagagttccgcctgcccgttaccaccctctcttcaccactgtccctgagatctgctcttcaagaggaagcctaaagtggagagtttgtaatcctgacaacgcccagctacctgcgtaccccggactccaactcccagtttgcaacgccaaagggtctaaagggcgaacgggggcgcattgcatcctgggagcaagaatcgcgataggtctgatggattgtgggaactgtagttccatgtgcgtgcgatgcactctatggtaggatagacccggggaagagtcatttgccggccaggaagggatacttttgagagcgtcagtgctgcatgccgggatttgtagtctgagggcccgcctcgcattctgggcggggattcatgctccttttcagggcgcccgctcctccccttggtattgccgtcagagatgggcggttggttattgctgcctgatggtggatgaagcagtggaaaagagaattgtatcgttgtgcttgacactaggggtttagttggaattgttgcttcgtagctgtgctcggcccacttttaatgttaagggacacagcattctcagagtcgtcaaactagcaagggtttagagaccatctgatttaatcccctcttttccagatgcacagggaggcgcagtgatttgcctaggtcacatagtgcatttatggcagacctaagaattggatttcttgattctcaagccagacactgtccattacactatgtcgactgtgtctaaggaattactatgcttgctttggggacagtaaggaggatgagttagacagagtggggatgtcagtgtatggagtcttaggtttctgttttcctgacttttcgcttttctgatgaccctcttggtgcctggaaagaatgataaggtcatggatggtggggtggagaatgtcatgtgaattggctgcyctctgctttctaccattctgagccaacaataaacttcaggagctgtggaccrgrgatgtggccrtcagagaggggagggctgagctagattgtttgtatgaaagaggcaagattttctatctcctatggctatattttatgtcacaggctctcagagtttagaacctcatgtgccctctctctttggctttttttcctactgctcagggcccagctgtgctgctgtgttaacctggaggcattatggaacaggtaagtaagccattggcatccatccactggacaaggctttgctttgatcaacaccatcaattgcagctgataataggaactatgggctaatgagggaaataagacttggctctgttgacaagagccagggaaacttcacacctcttcctcttggaacttgcaggatgaggttaggccagtggggccaaggaatgctcccaccttggagagctcccgccctgacagttgaggggggattgaggggcgagcaggtgggatacagacgcctttggaagtgacctcttgtggctaatctaggcactgcactctgcatggacaagagcttctccatccttcaaggtggcttgtgctagagccaggggtaggcagcatgagtggtcaagacttcccttttggaagactgtagaagcagaaggtgctggttgctgctattatttctttcatggatttttctctactggtttctgagctcccataatttcctgttgcctgcctcttgctgtcactcttggagagcagcaatgcagggcacacctctcagcatggaatgtgcatactgggggccaacgctgggcactttccatctttgtaggtgctggggcccatagggaaggggcaaacttgagcacatcctcccagccacctttttccagagcccatggttagggcctttgcctaacttaggatccaagcccgtaagctgcattaccactgctcctgacaatctaagggttttgtaaggccaagccagattagggcttcatgttttggggatcagtctctgtttcctattctaatttcccaagccttgcttacttagaaataaggggaaggagagatgcatcagacttcctgagcctagttagcattgagaagggcatcagtggcgttgagaagggatttgggagtgtgccagcctgtagttctggacctggcaaagaggaggaaataaggcattgggtggatgtgcagtggggttcctgggctcccacatccctgtaacatcagccattggggcctctgattttgcctgctatctgttgcactgtcccttttggtacaggggaccctgttcaactgcatgcaataatttcttttaaaataaaatctgagcactttgggtggctgaggtgggaggatcacttgagcccaggagttggagaccagcctgggcaacatagtaagaccccatctctacaataatttttttttaaattagccatgtgtggtggcctgcatctatagtcttaactattcaggaggctgaggtggatcacttgagccttggaggttgaggctgcagtgaaccgtgatccagtcactgcattccaccctggttgacagagtgagaccctatctcaaaaacagtagtaataaaataaaatctgaagatgattgattggtgggtctagcatgccttctggtcctgaagtccatatcccatttatctgccacctcccgtccctccaagaaagcatcattcacctggccattgctttttttttttttttttttttttttccaaaaacaccattttaataaggaaacaacagaaataaaagattgttctctggctggagcccagaccccatataatacattacatgtacaaagtggctttcagccagctcctgggcgtctccctggggctctcctaccacctgttccatgccaaattcctgggtccttggacctctgctcctctccaraatatgcccaccccctccccttatcccataacacagtggtcaagaggagagcctgacaagtggctggaattggaggagggactattagggtgaaratgtttgcaacagctaaataaacatcggaggaaagtctccctttcctcagggtatagggtggtcagtggaaaatggygtgtcctgctttggtgtggagcatgagtgcccagggaagcccaacctgaggtgggggtagggtccccctgaaccccttaggatctcctagaattactgcctccactgggacagggcaggaggcagaactgtccagaactttagagaactagagacctcccaagaggctgatgttggcatgccaggactacccagaggtcaccgttgagaggagttttggccattggtgatggcgctgtgaggagtaccctggtgcagttcccaccatggtcaagttaatcctgctgcaggttgccatgccagggcgggatggtggtcatgtggagaaaggtactcctgctctgctagtgtgttccaggctggtccagggcatgaggaggctcaggatgctggctgttgatgcttgtgctccagctatgttcttcccacaggtagatgccccctgacatgggcccaatgaagggccccaagtgggcaatgacaccaagaaaataggccatggtgggcatcgcaggcggggaagggcacaacttcttgagggcttggtggcatctcctcctaggtggtatatacaggaggtggagggacagcaggaagcaaggagccttgctgctggactgtggtgcaagtctgagttgacttccctagactgcccccacctagatggagacttcatattctctcgtctcctgcaaaggaaagagactgctgggagttggaaacttgtattaggtttgccaggccataattcaccttccctaggaaaagggaaaaagtgagagggcttggcaggaccctcagggttatctgcccaaagaagcaaagaactgggtcttggatagggtggcaaggctggcatggttacttactccagtctcgtaagttggattgtcaaacgctgactctatggtaatgcggttgtaggggcgggggcgggggcggggcagctgcagggagctttttccctggagcctgtggggcagagaagcctgcaagtcaggagcactgggtaggagtgaggtatgcaggtatgcagagcagaaagagaagccagactcacctggagaagtagaagtatacacctcctaccaacaacaccatcgccaccagtggcaagaagatggcagctgcaatgtgggcagcatccagggtgctggaggcagcaggtgccttggcaactgaagacacagagggtgtgactggagcagaggtctctgtcacctggagcccatattctctcacctctgcccaagggcatctgactaccagctccctctagctggctgggtgtagggaaggagctttttaacctgctaggcccaaacctctctctttctctgccctccctccttgggaagcccatgacctgggagccgtgagaaccaggaccagggagaccacttctctggcctcaagggtggagacttaccatccaggctgcgactgttgtagaacccatccagagaggctggaacaaaaggggagggccaagggcagtgagtgagcccaatgggccaaaccactaaggcagggagaggaggtagtgggatgatcatgggaaggatttgtccaaggagaggccactccagcatttgtcttggtgatgccaggtcagaaggatctggcagagactggggagaccaagggtaacatgaaggtggcatgggcaggtggttctggttctaaacattggacatctttgccagagcagctctatgggccagggagggttttgaggggtgacagggcactcaccagccctacagatgggtggggggtcactccaatgcgaggggtgcccaggcacacacttgatgctggcctggcccttcagcacatagccaggggcacacgagaagtggatggtggcccctgctgggtgtagcygcttctcaggacttcgggcaccattctcaggggcactgagaccatggcatggcttgagctgttccactacaaagcaggcagagtgcagtgagggtgtcatgcccttggcctccagggcagcatcttttatctccagctagaggttttccctcctactcaattgacacttacrgagacatttaggggcccggtcactccacttggggctgccagcctggcgatcatggcaggtgaggatggagctgcccrtcagcacaaaaccctggtcacagatatattgcacggtggcccccacgggaaacttggggctggatatgaggcgtcggctgtgctccacatctccaggatcgtggcaggaagtcactatgggtaggggtgatggggagaagtagcccaaggagaactaagcagaggccaatccaccctggctttgttccaggccagctaacttcttcatgtcgtatgggtctaccccctacgtatctgtccctaccattatgctagtgtgtccccccatttgtccccttcccatctattaggttcgataaaaactgattggccatctaccaggaatgaaatacttagagtacgtggctgataaccccatgaaaagtatcatccccatttcacagatgaggaaactgaggctataagaggtgaaggaactttgaagatactagctaataacagctacagtctggttcagaatccaggagagaggtttggagtttgtgttgggaaggggagcgtggggaacaggtatactcacccctctggcatgagggcaggtcctcactccaagttaggtcccactggcacatgaggacactggatcccactacctggtagccagggtagcactggtaagtgaccacggtgccgtgcactagctcaggctgcgatgggctcttccagccattggggatctcaggcagctccggacatgtgtcattgcggggcacctctgggggcacagaggcacaagatgcaggccctcggccagcaccaaagtgactgtccccctcaccttgagggcactctggctcctgctagtttgtcctggacctagactgtcctgggcgggctcagggatccattcctccctgctcaagggcccctccttgactgcctgacattgctctgtctcctagattccagggttagcatttaagctttggccttacttccaaaagcaccttgaccagttccttaggcctgagagatggggccaggtagggtgagggaaatcgtcacttctatgaaagattgtcagaaagatagaagccagcacctttccttagttcccccatttttgtttgaaagttgttctggccaggtgcagtggctcacacctgtaatgccagcactttgggaggctgaggtgggcagatcacttgaagccaggagttcgagaccagccaggccaacatggcaaaatccggtctccactaaaaataaaaaaattagccaggcgtggtggcatgtgcctataatcccagctactcaggaggatgaggcacgagaatcgcttgagcccaggaggtggaggttgcaatgaacagagatcacaccatggtctgggtgacagagggaaactgtctcagaaaaaaaaaaaaaggaagaaaaagaaagttgttctgctgcctacccaaacccctcttgccactatagaattctggctctccctcagggcagatggagaacaggactagcttcctccaggtgatccctggtgcttttccagcttactcttgtctgagacagcattcaggcacctcactgccctagcctctttggcttgccatggcttgctgtctgcactctgagtggggtagggacaagctcaccaaagaagtggatgacgaagccctgctggtagcccagcactgaggtcccggggtccgactggaactgaatggtgacatcagccatggaggtaaagagcttgaagtggctacggggccctgagtactggcccagaacccgggccgtcaggtcatccccatcatagaaggtaagcacatcaccagggcctatgcgcagcctgtgaaggaggagygtcagggcagagccggcctgggggccygaggatgggctggacaagggatatccccagacctcaggagttggctcggcctgacccggtaggcactcacactcggatgtccagcatgatgcgcttgtcctcttccacatgcacaccccagatacaatcctgcccacraccgtagggctctggccagttgggagagagtaccacgccagcygagtctgtgatctccccgctgcacacggctggaaggcagaggaggcccagaagggtcttttcaagcttaccatggtgttgcttaccatctgcccgcaggagtgcccacaaattgctgggaccccccacctcctccttggaggaagcctgaaccacgcatatcacagggcccctgtggccccgggctctgctgctattctsctggtatgaccctgccttttgcccggtaggcccatccactggtgtctactgacctcggcaggctggctctgtctcattccactggggrtcgtgggggtcaacacactcgatgatgatggagccctgctccagggtgtagccagggtcgcagctgaactccacagtggtacccacagggtaggtgggtgygctgctgctgaagttaccgtatttgacaaagggctcatagcaatggccctgctggaaggctgtaaaccacaggtcccagcccagctcagccttgactggtattaaacacagtgggcaagcatccccctacttccctccccagagcctttcttttcctgggtacgaatgacaaatatatgtcctggggttggagcaggaatgtgatggaggagggacagccaagagcatccatccctattatgctcaggaggccatcttgattaccatcctgttcccactgcctggttttgtgcttagtacacagaaggtactccatacatgttttttgaatgaattaatcaatgcatgcatgcataaatggttctagaatgtctcttacagcaattctttcttaagggttgaggccttttttgcttttcaaaatctggagaatttattcccttggaccatagggcctgggtccaggcagaggtttcctgcaaagctgtggtagggatcccggacccaaagagaggggcagggaaagggggcctaagtactgagtgagcaggggctgacttggaaggagtgacagcatggaggcagagaggggtagggtgtgggagaaagaccctaggcccgagcccatccccgtggacccgccacccccagtgaggccccagcaggctcaccctcatagcgcagggccatgcctgcagctgccccgctgctgtcagtactgagctcaacaaagaagtgtttgccagagctgagcaggccctcaatgggcaggtattccacctcataggaatcatacactggtggggcctccacgttgtccccattgcgaatgatgagcctgaaccaggagagtggcagctatgtaggctggtggctgacccagatggggtgtggccccaggcttgggtagcgtccctccagcagggtattaccaggccaggcactcccattccactaggacagcccctcacctgtcatcatcctctgccagggaaaccttctcaaagtgcaggtgtagccgctggccctcaggagcctcaagcagccagtgacaggtgaggttgttgctgtagttgcccgggaagcctggagagacgatgcggccrgtggtggcattgcggatcactccgccgcaagcagctgttaagaccaggacaggacgtaggctaggcccctgcctgaacccaggcagcctaacatgccttcctccctatcccagccctatatcctctgcttggagcagcggggaccttgcctccctgccatcttggccctcatcgtcctgaaggtcaaccttttagccctgtgaacctgcatctccaggcagcctgagctccagaatcctgccgcctaacctttcacacccctgggactgaccagggtaactctcttgactgtgggtagatgtatcactgcctggttgtgtgcccaggtaagtcactttccctctctgctgacttctctagaaggccgactctccctaggtagactttactaaagcccttactgtgggcttcaaccttcttggatacatctgctacttctacctcatgccactttcctaaaatcagttgtttgggtatgtcccttaactaggaccccctggagcaggaaccaggtctttccaggccaggcacagagttggtgttcagcgttggttgaataaaatgagtgaatgaatgtaaaaaggggttagcactagatccgggcggcaaacacctgatgtgcatgccatccgccccggcctcactaccactgccgttcctgggctgactgacctttctagtgctgaccctactggcttggggctgtcctctctttctaaggagagactgaacagtttgcctatggctatctgtgaggattgctgggttacttggccacaaactcctggcggttatgtgaggccagagaggggtcctcaggcaagaggagtatggctggttccaggcagtgctttcctctcctggacacatagctctgacctacccaactctcagagaccaggctgccatgaccaatacacaggacctttgtctccaaatgctcaaggcagcagaatattgtaacctagtaaagctcctggggggctggggcaagtttcttctctgcagaaaggacagacctgcctcrgcttggtctcagaatggaactgcccttcaaatctgatcatgccccatcctttgctgaaaattgcttagtggctccccattaccctcaggatagagttaaagctgaaaatggtgttcaagccctttatgaatccacctctctctagactcagcttcagtcccctctccccgcataccctctgcttcaggcacacttcactgtgtgctcactatcttgtgctatttcatgcctgcacatctctgcatatgcagttccaggaacccaccccactttcccaaactaatatttctgaaatccttccatgctgtctccttgggaagccttgcttgcctcctctctcatcttggagtagctctccatcccttgggctcctccaccactctgcctttactcctattgtagcatcctctgcactgagctgcttgccagcctccccgctagatcctcgagggctgagaaagcatctgtgttattcaactctggttgtgcctggcacccaggaagaatttatagaatgaaataagattcatggctgggtatggtggctcaagtctgtaatcccagcactttgggaggccgaggcaggtggatcacctgaggtcaagagttcgagatcagactggccaacatggtgaaaccccatctctactaaaaatacaaaaaaattagctgggtatggtggcatgcacctgtaaccccagctactctggagggtgaggcagaagaatcgcttgaacccgggaggtggaggttgcagtgagcggacatcgtgccactgcactccagcctgggtgacagagggagactccatctcaaaaaaaaaaaaaaaaaaagattcaaaagcctaagcccatacccactaaaaagaaaaagcccggccaggcrcggtggctcacgcctgtaatcccagcactttgggaggcygaggtgggtggatcacgaggtcaggagatcaagaccatcttggctaacatggtgaaaccccatctctactaaaaatacaaaaaattagctgggagtggtggcgggcgcctgtagtcccagctactcgggaggctgaggcaggagaatggcgtgaacctgggaggcagagcttgcagtgagccgagatagcgccactgcagtctggcctgggtgaaagagcgagactccgtctcgaagaaaaaaaaaaaaaaaaagcccaagttgcttttcatactgcaaaccaaacactgagtcttcctttctccaacaagccccttttcattggcagcaatcccagacctgatcactcaggaccagacctgggagtcccctttcccttttcccagttcccatcagtttctggaacttccctctgcttcattccccaaatcacaatctaagttcaaactgtcttgcctggctggcctcccagtcatctcctgaggaattctaaggccctcccttctcataagcttcaacagctcctcagcctgtatcttgccctgacactcaaggcccttccattgccacatgtctcaggcttcagccaaacctggctgtcttctgtgtccctaaacaccctcacctgcctgcctctatgtccctgcccacgttgttctctccatttaaatgtcaaacctgcagtgcctcctcccctaggaagcctcctaaatgtccagctaagaatgattgcgcccttgcctcccaggtcactttatgtcttttcattggtgctttttacttcttcccctggaaattggtgacctctgtgctttctcctttctccctttcctggaaatgtgkgttctttgagggcagagtccctgtttaattcagctgtttgtacctgtggtgccttcatctggtagatgctcaataagtgcaggttggatgaatgccactgaggtgcatggccattttctggcttccttatgaagagcaaatgaaagtggcagagagcaacagagagcagggatgagcccccacctcacttctctgctcagcactgagccctttcccctggggcactcaccgatgcagacgggctcctttgaatcccagaagggctgggtggcattgagacaggtgagatgcctggygcccttcagctggtakccagtggcacaatggaagcgggcactaccccctgggtggaggctggtgacagtcacatctccataagctggacgacggggaaagtggcagctcaggagataggctgcaaacagagaacgggtgacactgtgtatgtgtgcagggtgggggcgggagctgggccattggttgggggaggtctgcctcagtctgcctggaggtgtcatttggggccagaggaagcactaggagttccaaaacaactccaatctcctccctagaaggttaccagtgatatttccagcagcctgggctggttagtggagcagacagagctggaaattagaagggttaggttctggctcaagctttatgacactttaggcaggttatttaatctttgtgtgtgtgtttcctcatttgttaaatgaggtttaaaatcctagcctacctacagggttactgtgagaagaaatgatagagtattttatctagcttggtatctctggtacccagctgatattatatcttcaggaaatgcttattgaatgactcgtagacatgaaagcacttgaaatagtgaaaaacctatacagatgtaaagtgttgatactgtttttcctttagggaataaatatgaattgcagcagcaaagagtgaaatcagacagtaaaggctttcccagtattcactgagaaatgctaaaaagcttgatgccaatggccatggacttcttttaaaaccagaatggtggccgggccggtgtctcatgcctgtaatcccagcactttgggaggccgaggtgggcggatcacytgaggtcgggagttcgagacaagcctgaccaacatggataaaccccgtctctactaaaaatacaaaattagccgggcatggtggcgcatgcctgtaatcccagctacgggggaggctgaggcaggagaatcgcttgaacccgggaggtggaggttgtggtgagctgagatcactccattgcattccwgcttgggcaacgagagcaaaactccatctcaaaacaaacaaacagccgggagtggtggctcatgcctgtaatcccagcactttgggaggccgaagtgggcggatcacctgaggtcaggaggtcgagaccagcctggccaacatggagaaaccccatctctactaaaaatacaaaaatcagccggacgtgatggcaggcgcctgtaatcccagctactcgggaggctgaggcaggagaatcgcttgaacccggcaggtggaggttgcagtgagccgagatcgtgccattgcgctccagcctaggggacgagagcgagacttcatctcaaaaaaacaaacttacaaacaaacaaaatccagaatggtggtaggctggggcaaggtgggaggattgcttgaggccaggagttcaagagcagcctgggcaacatagtgaggtccccatctctgtaaaaaatttttaaaaaatacccaggcatggtgatgtgtacctgtagtcttagctactcaggaggctgaagtgggatcgcttgagcctaggagtttaaggctgcagtgaactatgattgcaccactgcgctccagcctaggtgacagagtgagtccctgtttcgaaaaacaacatcaaacaaacaagaaaaagatggggacgagggtagggaggcagtgcactgccttcatggaagttggggaaagaacaagttgccctgggaaagctggtagctttggaattgtcataccaaatttgaccaaatggtggcagcaaatcctacaaaacaatctggcatatcccgatcctggggtcaagctggggtggtagctaaaaggatcaacccggtgcagtggctcacgcctgtaatcccagcactttgggaggctgaggtggacggatggcctgaggtcaagagttcaagaccagcctggccaacatggcaaaaccccatctctactaataaaatacaaaaatattagctgggcatggtggcaggcgcctgttatcccagctactcgggaggctgaggcaggagaatcgcttggaccggggagatggaggttgcagtgagtcgatatcatgccattgcactccagcctgggcgacagagtgagactccatgttccaaaaaataaaataaataaataaaataaaataaaataaaataaaagtgaagatccagctgggcrcggtggctcacacctgtaatcccagcactttgggaggccgaggcaggtggatmacaaaatcaggagttcgagaccagctaacatggtaaaaccccatctctactaaaaatacaaaaaaaaaaaaaaatgatctgggcatggtggcaygcgcctgtagtcccagttacttgggaggctgaggcaggagaatcgcttgaactcgggaggcagaggttgcagtgagtggagattgcgctactgcactccagcctgggcggcagagtgagactctttctcaaaaaaaagtgaagatcctggcttgcgtctaagaggtgagagcaaaggcctggaggggtcaaggagaggctgagaggcttgtgctacagagcctgataacccttggggtggtaggaaaagtgaggactgtctagactgaagatcttgggtcttggggtagggggcagccccactgatggtatcaggtaaatgggaggagaggtccatgcaaggcctctgttcctgggtgcctttgtgtgaatagaaaaatgggccctctttcttcccccccattaaaaagaaaaagaaaaagaaaaagaggctgtctcagggcagaccagggtccagaaatttgagttttatgactttcacctgtcctgttactatgtctgtgaaagtgggaggagaattcctcctcttctgtctctcatggggctctggagagaatggtcggtaagtggctagttgtgcttggcaggcagtacagggcagtgcttagcaggtgggctgtgggtcagactgcctgggtttgaatgcaggcttcttccctacgtgctgtgccaccgtgggcaagttacctaaattctctgtgcctcagttgcctcatttatccacccactttcagtattacatccaaggttgtggaggttaagtgagaagacatatgtgcagttcctgaacaaatgcctaagacatcagcctgctgttattgtttgtaatcttgattaataatagcacctcacatctacatgtactttccagattctaaaatgccttcacactcttctttcttgatgtctacaatatgcttgggagaaaggcaggcaaggtaggggctatgagcccattttcagatgagaacaggttcagagagaccctgtgccctcatcacacagcaaggaagtactagaccaggaacttgaagctcctgggctctgaagccttcttgctttccaccaccaccccacctgcttcctcatttgaagtagaaacttgggttcaggggtcagagaaatctgagagtaacagacaagcctgctctgggtggttgtccagggcagccactcacagtgacctggggagaggtcccagtccaggatgggatggagaaaggggtgtggggcaccacacccagagtggaggaggttaagaggttaactgacgcctagtggggtctagaccatgagccaggctcaggcccagcatttccccttacatcttcccctttgagttcttatcaccactctagtaagggagggccctcgtttcacagatgaggaaactgggctggaatggggtggaactgggctggaactgtaggaggctgggggcagacaatgaagcccccagactccatagtagttaaagtatcacttcccaggatgagcttcctcctgttgccatgacaaccgttcccggggagcctgaaccactgcaatctgttgagttattttctcactggagtctgtttctggagccaagtccagtgccaggaatgctgaggatgcaggagggggatgtctgtcagggccgtctgcctccccaccctgcctgaggctgtgggaggggagttgacttggtcttgcgataaggcccttgtgagggctcatccttgtgacctccaacatcagcttggacagctcgagcacaggtgtgggtactaggcccctcaccccctcttctggcaccctctttctctagcccacggagatttgcgtgtgagcacacgctcctcctgttcccatctctgggatcagggctaattacagcctataattaggggaattacactcattaaggcaagagctgatcattgacaaaaactgggctgacgagggagggcttctgggagctgagaaggaggcaggaccaggccagctcttccagcccttccttggaggttgctcccccttgctgggcctccagctcactgccattcagccacctttgtctggcccgacagagaggaggtccggagttttgtgcaaaggaatttgcagcaagagagaaggttatcatggcgtgaaattatgcctgctgccagggaggattgatgagccattagggaggctagctgggccgcctagacgtttcacccttgcctcagctggccccttgcctctgccaagccactctacagccccatccacttccaggctccctgctgctatgccagactgctccagtagtttgggtggaggggtgagggtagggtgagtgctccttaggtggggttccaagcagccccatctccagagtgctggctcttctgcccggctgtggtcccctgcaggactgcggaagtggtccatgacaatgcaagacaatcccttgattgttcacaccaattatttccgtattagttctccctagtctcaaatagttaacccatgcaaaggatcgagctgactttgtgctcagagagggggatgggtaggagggacacagctgagacagcggcaaagtcctgagccccttttcctccctctcccatcctgccagtcatgtaatactggkttccttaatgaagcatgtgctaagcacttgacatgtaccattttgcttaatcctaaccatgactttgtggggtaggtgttttggtttcatattacagcagaagggtcagagaggtcaaatgacttgtccaaggtcaacagccaatgaggagattcaaacacagatctgcccattgcctgagtctgtgattttttttcattacatcgtgctgctcccttatttccagaggtgttctgagctgattggggcatgggccaggtcaaggtgggtgaagcagttcaggaagggcagtctggcagctaagcagatggtcattgtcagatccctttgaccttcaccctcttgcatttggggagggcttctattgttattgcctgtttaagtgtctgcctcctcctgagaaagaactccttgaggacaaggaccttggtgcatcctgacattgccagtgtccagcacaagcctggcaaagagcaggtgcctaggaaaagtttgctgaatgaatgaatgagggacaacgggcacacctagaggctacctgatcctgagtcaagaccagctctctgcagggtggtgggtggaagagagaagatcctggaggtttcagatacgcgatacttacctccaattgtccagagcttcactggacatttgtgctatgtgtcactagsccctctctgctccttccctctaggatgtaattgcacagagacccccctccccagcaaggagggcagcgagtctgggctggttccaccttcaactacccaggccttaccttggtaatggaaatggaaggtgccagggccagccggtggcgggaggctctggaacctcagggccgcttggtgggtggggctgcggatgacttggccccgcagcaggaaagactggttggccaggggcagtgggtcaggcccccccaggccttccacagtcactgtctccccttcccggaggctgatattctggacctgtcagtagagtagagagagaaaagcaaagtagtcagacttcttcctgctgcctggatcctgccgccctcaggatcctgcaggccccgggcagatcaatcctcaatgctacttgagcatcggagcccccaggccctgagctgggcacttcagcagtgcaggagttgctcatctcagtgtgagacaggaccggaagttcagagattaagtaaattatccaaggtcacatagagattcttagcagaactggggtttgtaaacacatctttctgtctccaagcttttcagatacaccagctgcttcctgtcctgcccctccctgggctctgttttctcatctgtaaagtagggatggggtaggtgtattgaaccagatggtgtccgaggccctggtcagcagtatgaggtcttaaatatcagatccatgtgcccagcttcccctggacatccctgttggatgcttcacacccagcctgcctcatgctaggtgactgtcttcccctagccagcagttcccctgggaatgatcttgctatctccctgggtgtccaaatcagaaactggcatcttgcctcctccctcatacctggtcagtcattcagtcctgtcaactggatctcaaatctgttcattactcttcatccccactgccattccccagcttatcgccgttactgtgcacctagatcaccgcagcagcctcctggccagccttcctgcctgtagggcttaacccactcctccctctacagcagtattttctgaactatagccagctaacggtcttagatctgttgctgatcatggtgcttccttgtttaagtcctccagtggctccccattgagtctgtgaagccgataatatgtagttcaaactctttgcttagccctcaaggccctgcccaacttggcccctgctgactgtcagctgggccttacaccatgcccctccgcatgtcaatcgtgattctctcttttttctgagcctctttctccgatcctttcccctggctgtcacagtctcctctgctatcatgctgatcttcaggccctcagtcccttgagcatctttctgggctccatgcctccattcaggcaaacaaggattggacaacgacggactctgcccagagggaaattagcagcatggcttgatagaaggaacactggattgattgggagcccagaaatctgggacctcatcctaaccatgtgatcttggacaaatatgctgctatttgaacttcagtttcctcattttataaaacgaactagtggagttctttgctacttaaaatgtggttcttggaccagcatcagcagcctcacctgggaacttgtaagaaatgcagaatcttggctgggcgctgtggctcacgcctgtaatcccagcactttgggaggccaaggcaggtggatcacctgaggtcaggatttcaagaccagcctgaccaacatggagaaaccccgtctctactaaaaatacaaagattagctgggcgtggtggcacatgcctgtaatcccagctactcaagcagctgaggcaggagaatcgcttgaacctgggaggcggaggttgcggtgagccgagatcgcgccattgcactccagcctggacaacaaaagcgaaactccatttcaaaacaaaaaaaaaaaggaaatacagaatctcagacccactaaagcatactctgcattttaacaagatcctcgggcaactcaaaagcactgatctacatgggctcaaggttcctaccatgttgctctgaagcagggtttcaagggttgaccacctgggatggttaagtggcatcagtgagtcaccaaatccttcccagtcttatttcccaaatactccaatgggttcctcctctctatccttttgttactgtcctggccctaattacctcctgcccattacttttcacttgagaatggctttctgtctgtctaacacttcccatccccaactcatctcctgctgatttcagattgcctggaggacaagctccaaactgcccagctcacatttggtgccagtatctctgcggccctcattaacgtgcactgcagccgcagaccacccctcacttctgccccctgggcatccacatatgggactctgcgggggcaatatcttcccttcttcccctcctggtgaagctggtcatcttttcagatcttagggccgcatcgtctgcctcccaggctaggccagcagtccttctgtttcagactctccccactggcccctgcccatcttgctgttaaagcccagggtggcatgttgggtcacagtgccctcttcactggccagtctcaacaaagacgtgtggaaagagtaaatgtgtgggctgctggagagacattccccatcagatacctgtgagctgagaagcatagaggatgctgagcccagccaggtccaaggatatggctgctgcgaggctcagggcccctcagactgggtgctgagaagagatgtgccctggggactccagaaggggcagctgggcagggagaggtccctacccctgcctgagaggaaagacctggtgggtctttgggctgaagagaaggctcaaggcagggtgctggaggccgaggcgtctcctctctgtgagaaactctccacccaggcacgtttgggcggaggctgcctgaccatctgctggggacattcctcagggaattcctgcagcaggcggaggctggatgaggtcccttcaaacttggagattctgtgattctagagttgggaaaacaagactcacacacgtggaatctgtaattatcgagagatgccaggcagcatataattccgccttaagtggcactgaatgcaggcagcaggaatcctcggggggagagcgaagggctcagaggctcagggaaagtgcctgaagcaggtgggtctcagagtgccttgaagagaggagcactgggagaaggaggaagggaggacgctcactacagggaaattaccacgaaagcaaaggcagagaagtattactagaaattaatttgtattttcttcctagttccccatatacctctggcttgacctctagcttctttttcctgatcttgctgctttgggaccagagagaagctgtagcgacagagtaacaacagttgccatcatagagtgtgtcaagccttgtattgtactaagtgcttttcatcctcaccgtgaatctataagataggtggtaaaatacccaccagtaacagaggctcagagaagctaaggaacttgcaaaaggtcacataggggttaagcagtcttgctttgctgagacaaggcagctccctatcctcccaacttcatgggggcatcttctgtagaaataacatctagacatctttattcccaagctcagcacccccaggtttagcaaggaggtgggtcttggcttggcctggcttttttaagatgttgggatttgagttcccaccagccacccttgctcctagcagtctgtaaagctgggaaaactgagactgagacctctggccccctctggtccaggggaggcatggccctttcaagctggcctggctcccggcccagtctagtggtgagggttgggatgagagtgtggaatgaagtggctcctatccagaaggctccctgttctcaaccagaggctgtctgtgcagctctggtcccctgggtttcaagcaccctcttgtgggtctgctgcagtggctggaatgtaatttgtcacttgtttgagggccaggctgacagaggccagacagggctgggtgtcggacaggaggggtgatgaagtcttgatgcaatttgcaggcatctgtagagcctgggagacagattgaaatgtcagctctgttcttgagggctgtcttccatacccatagccagtgacaggaggggacctgggggccaggcagggggaagacaaaagcagagggagctgaggacaattcctccaggaccctgggctgtctaacactgccctgcttccagcagaccatggagtcagctcaaggaggaaatacagccactttgagaggctggccctttccaggatgggaggtgggaaggattcaggttgtcttctgccaacctctagctcaacagcctcatctgccctgtctgtccccatagaagctgtcagtcaggcctccagcacgtgccctaatggcgtaacccacagacgagatggcactacagtttttgtactcatttgcaccagtacaacccggcataggcagatgagctcaaagatgactcttgtgtgcgatccccacccccagatgctggctacaggtctcctaggctctcttggtcaccatcacctgtgtgtactcggacacaggcccacttacacgcacacagccccctcaaacgtgtcatggcacgtgcacttccaccccctggcagaaaataacccaccaatccaaactctcacactatgcctaggcgccaccaccaccctattcgcatgccctcacacacccgtgctccctcacagcaaccataggataatcacaattttcccacaagaaccttcgcagttttcacatccattatctcttcagctctcataaagtctcaataagggaggcagggcaggctgttttcctgcactttatagataagggaaccttgtaatcagggaagttgagagatcctctttggtcacacagtgagtccaagacaaagccaggactckaggccaggactcatgattcctggtccagtgtcctgtcttgtgtgcctggcaaccccaggccctccccagaactgggagaattccaagtggatgtcctccagaatcaggcagggctgactgggaaagggcatctggggcagatcctgacaggtaccggtctccgcctgggtctcccactttggatttgccttgtgccacagacaggcctatctcctgggccaagggaagaacaggggcttttgagtcttggattgaatcccggctcaatcactgaccagttgaggggccttaggcaagtcatatgacctctctgagccccagttttgcctgtgaaatggggatagtttacctacttcatgggtttgtaaggatttggttagatcctgccagtaagggttttagcacagaggggcacagcgctagcagtcatctttccatttaatggggagatgtgggccacaccctggtaaaaccttggcatttgcagcagaaatgatagccggctatgaacttactttgccctcaggtctgccagggctctgcctgggaggcattgtaccttggagccaccctctccctggcccagactctgcagctgccaggaagcaagcagcagagccaagaacctgaggtgcccctgctcagtcaggcctataagggagcttgctgaccccagagaaggagccacactcaaagggactggctaggagaagcctggtgcatcatctggttcaatctccctttatagagaggtaaactgaggcacagagaaggccaggggtttagctcagtcacagagaggtgggctgcagagccaacactgaaaccccagtcttacaagacagactctgtgcccttctgaattggcacttatccagaaaaccttatggggtaagatctgttttagggatgaggacagtggccaaaatccatggggctagacctgactgcaccctgtcatccctcttggataagcctgcctagagccaggaaatataaagttgtccagaaattccacccaactgaccccctaccccatgcccacatcaggcctggtcctgacacggcttagaagggcagggtattctggctatcaaactgtcagctggcctggcatgggcgagctgtgtgccaacagagccacctggggcacgagggcagggactgtgggcagctgtgcccaggctccagatggtacagagagcagccaagccaagatggaggctggcagtgggaaggctcttggaatgccaagtgcagagagaggcaggcgccaggcccggaaaggcctggagccctcagggggagactgactgcctggggaggggctgggacccacatgggctgtgaggctcatgcccatccatcctgaaggggcttctctggacctctcaagaaagagcctagcccaatgcctgatccccagatgaatcaggcaagcctccttggatcacagagggcctgacctggcctcctccctgtggatggctcagaccttcagcctcagagggcatcaataactgcagcaccatcaaaggaggtgggaggcaggagatgaagcaggttatgagaggctgtggtccaagccatggagaatagggcttttagggattctggtacccctgaggctggtcctccaaaaaaagggaattgagagggtcttgctgaaggccccggacttgaggcaagggctgtggtctcatgctagggtcccagcatggtgtctggctgctttgctcaggggtatgatttgtgggtccctaagacagtcctctcctccatggctcctgtcactcttcttgcccagactttgtcccacctatctgccctgagtgatcccagtgaattcatagaggggcaggtggggaattctccatgatggagggaagccacaggcagtcccttctccccaagcctgaggagccatggggagctctgtaggccttccagctgcccacccatcctgcccccagtgtccagcatggcctgacacaactgtcagcctgggcagaaggacgctgctcttgggctgagcctctggcaggagtgtgatccggaagcccttacccttaccctccgcccctacacaacaaagccacctttccaaaacagccagggcagccttcaagggccaggcctgccgcacctgctgctgcccaggccagacttggctgctggcttctcatcctacaggtctcaggccaggtgtcatcacctccaggaagccttccctgacccccaggctggtggagtgtgcccgtcctgtgcttyccatccccatccctgccagcactgggcattccgtggtcattgtktatgatwtctgtcttccctactaatcatgaaggtctgtgtccccagtgcccagcgcagagcatggcacatagcaaattctcaatgtttgcttgtggaacaaatccactcaacaaaactaattagtaattaactgactgacttttggcaagtcccttttcttgcctgggcctcagtttttccaactctccagtgggtattgttgggtagtgtcagaaattcttcaggtcccaagtggcctgggtgggggtggaggttgccagaactggccctggaagaagagccttaaatcctgcttagttctggctgattctttctcttgctccttccccaaattgggtgctgaccccgctctggccaccctgtgcccgcctcccctccatgacttcagactatctcaggccgtccgggccgacagtgtccccaaggaccctgcccccatggcaccgaggtggagggtggggccagcatctgccacatttcctgacagcaatccagggctgtggcaggtcttcgtctcaaggttgcctggtaatggcttttgcattctgataaaagaaaaaaaatgtggcagcaccagacaacagacacggggcttatgtgaggggtgggcatccagcatggggcttgtgcctgggccagagagggggcaggcagagccagcatcttgctccattgtgkagggtgccagggctgggctcagccttgtccagtgggcttcaktaggggtggtaggcttggggggggcagacagagcctcccaggcctgtaggggggcactcagcctggcacctgccccctcccaccccctttcccacacctgcagctggtgctttccacccagtgagccacagccggtgccacctctcattaggtgatgattttacattaattaccttaattaagcggtgctgagtgctaatggcttgaggcggggtggctgttcctaattaccctcccagtcagcccagagtgaggggcacagggcttggcagagtaggaggaaacagttgtaggaagaaggggaggggcccaacaggggtaggagagggtccccctgacagggtctgattcagatacctggacctgacatccccagaggggagggctggaggcactgccccaagataggtctagacggcttcagtccccaatccagggacatgcaggaattggaatgggcgggaagcagaacagaaggcagggagcagggagcaggacacacttctcagcgccctgccagattccctcaaccaggctgaatgcctctcttgcccactcctggtcagtctccaagattcaagtcaaatgtcatcacatcccttccttcctccatccctttgtccgatcattcagtcagcgcatggagtacccattctgggctctgcactacaaggcaccccttaaggagctcacagtctagctggggaggtggacagctgtaaacagttggatggaaggcagactgctaagagctaagatgggggatgccccaggctttggggatctgagggaattcccagagagggtgatgccagggccaagtcctaagggaaggcatcatgggatgactcttccaggcagagggaccagcatgtgcagctgggacttgggaaagaaggtttggcccattcagttagctgcaagctgtttagtgcaaagtgggggtaaagaacaagggacgaagtgtctaggggtggacccagagagactgaccttgattcaggagcccttagagaggtgtagggggcaggattgatttgagaaaaatgactgcagtggaggtggagatgggtagagtagggagcaagtgtgggcggggtgaccagtgaggcagctactgcatcatcaggggagggatggtggggtctaaaccacatgtggttgtggggatggagggagagaagcagagagatttagaggggagtatcatggtgacagaatttggggatgaattgatgggactgggggaagagggacagggaaaggctaaggagaccccatgttgcacattaagggacaccatccacattgcactatggtggttctgctccaggtttctgacctggacaggagtggctttgggggaacaaaaggaagatttgggtttgtggaggttgaggagcctgtgggacatctgtgaggacctgtagcctcaggcctcgggattaagagaaagtcttaatcctaacggagggatgagataacccagggaggctggggacaggaggctggcctgtagatttgactttcctatcagctgatcacctctctgatggtgtaatcaggtctgtcttcccccacctctgcatcccagaagccagcacagaacctgacccagaggaactgctcagagaggatttgctgaatgaatgaatgaatgagtgaagctccatgactctctcaggcccagcgaggcagccctgtgttctctgcttagcccatagattcagatgtagggtttatactcacccagtcccctgcccatccaaggctagagccccctcccacagcccctcttggcttaggccattgccaaacacacggggcagaatctaaccatttaggcccatctcccagccctggccttaggcgatgccccacaattgatgcccctaakcatccccacatcctctcatagcatgtgcctctctgaagaaagagaatacacccrccccagctttgcccttgccagatccagatcactcaccttgatttccacgccatagccagggtagacagagatgtagaagaagcagtccaggccaacatcagtgggggagctgaggtctgtaggggagtccagagagccctctgggcctgagaaattccagctacaagggcctgggaggcaggaggagacacaaagctagtgccagctctggtgaagtggtccaactaaggctgaaccgtgtgtgtgtgtgtgtgtgtgtgtgtgtgtgtgtgtggtgaagaccacctcttgtgatgtctagtctcctgttgaaggaaggggaccaccttttattaggcacctaccatgtgcaatcttttttttttttttgtatttttagtagagatggggtttcaccatgttagccaggatagtctccatctcctgacctcatgatccgccctcctcagcctcccaaagtgctgggattacaggcgtgagccactgcacccggccccctaacatgtgcaatcttatctcagttttcacagtagctcaatgaggtttgttttctttctttttttttttttttgagacggagttttactcttgttgctcaggctgaagtgcaatggcgtgatctcagctcactgcaacctctgcctcctgggttcaagctattctcctgctcagcttcccgagtagctaggattacaggtgtacaccaccatgcctggctatttttttttttttttgagacagagtctcgctctgtcacccaggctggcgtgcagtgacatgatcttggctcactgcaagctctgactcccgggttcacgccattctcctgcctcagcctcctgagtagctgggactacgggcaccccccactacgcccggctaattttttgtattttttagtagagatggggtttcaccgtgttagcaagggtggtctcgatctcctgacctcgttccacacgcctcagcctcccaaagtgctgggattacaggcatgagccaccgcgcccggccaattttttgtatttttagtagagacggggtttcaccrtgttggccagactaatcttgaacttctgatgtcaggtgatccacctgcctcggcctcccamagtgctgggattacaggcatgagccaccgtgtccagccagaagtttattttcttattgccattttacagatgaggctcagagatgagatgttaaatagaattcctagggtcatgttatagttggaagaatcaagattttttcttttttgagacagagtctcgctctgttgcccaggctggagtgcaatggtgcaatctcagctcactgcaacctctgcctcccaggtttgagtgattctcctgcctcagcctcccgagtagctgggattacaggtgcccaccaccatgcccggctcatttttgtatttttagtagagatggtgtttcgccatgttggccaggagggtcttgaactcctgacctcagatgatccactggcctctgcctcccaaagtgctgggattacaggcatgagccactgtacttggctgaagaatcaggatttgagctcaggtctatctgggtccaatctacatgcctcctgcaggctggcccttggtgccaaagggcagggcaggctggcacagtgtcagagacaggcttttaggggccccgcagcctcccccatccccatttccacatctgcaagccagcaggtagctgacctggtgtctggactgtggtgatggtggtggtgatgatggtggtggtagtggtggtctcctcatcatctcctgaagctgtggaggaggtgatggtcccctggatcccgatccctgygccctgggacacaacctctgcaacccacggccttcccatgtctccaggaccctcttgggttggtgtccaggctctgctggggggtgtagtgctggctatctcccctgggcctagggtgggcactgccatgctgggccctggaggtaggggagctgtgattcgaagcataggggactctgactccggactccagggtccctccttggactggggctgagtgggtacygcasccatggctggagtggggctggtaaagacagggcggctgtcctggttggccaggcggggaagggsacttggggtgaagggtgcaggtgggtcaggctgraaggrcagtgctggcctcagctcctcatctcccttttccagcccctcttgtaggaattcctcaagcagcgggtggtggttgagcagcttcaaggtgggggctgttgtgacaaagtggaygcctcgttctggctgctcaggtgtgggggctgctgtcagctcgccatctgtctcctcgatgcctggggcttgtcctttccccacggttggggcctctaaagagagtcctgaaataataagggatggtcagaggttctccccctgctccagagagcagcatcacgcccaactcgagtagtgggggggcccgctctcttttgacagacagccctgaggagcgtgctcactgctgagaatcacggaactacagaatttgtgaactggaagtgaggtgctattacatacttcaagggtggcacatgagatactctttctcctccagcaccagaggcaggcatttctagcccatccgtgcactatttcctactgttctcaggttcagcctcagaatcctcctcaacacagcactccacgaggtcacacctgacacctcagactgacatgacaaatatttgccatccctaatgaagagcagaggccttattttactagtgaggaaataggccagagaaaggaagtgacttgctcaaagtcacgcgaccagttgaattgagatgaaaaccgtaagtgtgtctcccaccacagtgtctttcctgtctgagatgatagggcattcaagttcatttcctgttctcagtgaacctgctggtcattagcctcaggaaatgcgtcacatatttgggattttattttagatttcctcatggttgcatgacttctttttttgtttgttggttttgagacagtgtctcgctgtgtggcccgggctgcaatgcagtggtgtgatcatggctccactgcagcctcaacctcccaggttcaagcgatcctcccacctcagccacagtccccacacccccacttctagtagctgggactacaggtgcatgccaccatgcctggctaatttttagaatttttgtagagatggagatctcactatgttgtctgggctggtctcaaactcctgggctcaagcaatcctctcacctcagcctcctagggattacagcatgagccaccgcacccgaccatgggtgcatgacttctttgttaggggcccagtagtttctctccgttctcaggaaatcatttcttttgtactcatttctgtttttatggtccttctagagcagtaatatgagtagagtgggaagagccaagttctggagctaggcagacataacttcaaatcccagatccactactctagggctgtgtgccctcaggcaaataacccaaactctctgaagctcagttttctcatctgtaaaattgggtttcctttttaggattgactgagataatattacatcccgtctctatttgatatgtccccctgagttcccttaatctttctggtgacactaatcaggttccatctagggcagggtgaaaaacaggtgtagaatggaaatctagcatgctacccacccactccctaatccatggcaggcattgctaatcaattttggttatttcttgctaaggccacctggtccttagcaacttccctctcacaatgttattcaggcagccactaccaatcaatgagattggctctgggggatgaaactgatttgctatctctggtctgaggtacagattgctctgctattgattgtgttgacttattcaaccacatagctggagagatgatgcatattctgcttgtggcccattcggctccccagatccttaactgccaagaaaaggtcaatgaatgctggctccagattcagctcatacagaattttgccagctctgagaagcctgggaggatatttctgatccttacagctctcaaaatggctgcatgaggacttgaagggaaacacagccggggtgagatcacagagtttgcaaggagaaggtcgcttcctccgcacgtctggtggtggggctgtcattccagaggctcacacccactccatagattggcaggcatgaggaagcagcagatggcctacgttctgttcaggagaccatagcagctctgatgtgtcagacaaatgggaggagggaggaaattgggtgggggaggtgggtacaggttggagggctctccattcttctgggtcagaggagcttgggcaccccacatccctgagaaaccaggaccaactgctatctcctgagatgcccactaaagcagcccatctgtgtcttggcattgtgtgccagccactgacaacaccatccaatctagatgtccagccaggcccacaccccccagagcagatggtccaccagtgcctgtctttcatctgaataagttacggaaggtccaggcagtgcctgtgacatgccagaacagggctcctctttttgcccaccccccagacatcacacaggctatgccaggtaagctgagactgattctagcatggcgcaaggaaggggggcttttctaatcacatagattggagccccctggatccgggcattgtttatgcggcccctttccagagtacccaacaagagatgtggcccttggctctcagagtaggtacctgtgtgactcttcctgggagagggagtgcacagagattctctaattcaggaagtgtccagggcaggcrcagctcttcccgctggctgccaggtgggtgctgagcaatggagcagcactaatgggcacctcccatcactgtcgattgcactgattgtgctatctgggatcgagatagcatatcaaacgagcaagttgattccaaaatcagctgccacttggtcccagcgggtgccacccactgtcatagagggtaagataacctctgggagacaagccatttctggggagagggcatctccagaccccctggttgactctgttggaggcctgaggccctgagacctgccccctagtttcccaggattgtggccagtggataggggcttctctctgcctgggctgactgaattcaggggtgcagggactgacgaagggagagtatgatataggggacagcagaagaaggtgtcaggggctctaatgcccagtctcatcaggcactactgtgtcaggcccttcccagaccttgtatcatttaatggatgctgcgcctctgggagatgggaattttatttccattttacaaagacctgaagcctagagagctgaggcaaggactcgcctgaagtctcgcagtgacgcagctgggatttaaaccttcgatgatttggcttcaaagccctaggtctttccacatacccacctgcctcatgggaggggcagactggagctacacagcagacaacactccagccagttgaagaaactaagtccagggagaggcacggactcgtcgaagatctcacgccatttagaagtctggggccagagcttctggcattgggacttgggttgggccctggtcgagcaggccctcaggaagccttctggctgggacccagggaagcccccaccctgtgcctgaagcacatctgagcctcaaacccaaaccggagacccaacaacactgctgtgtggggccagggcacagagccacacagacctgggttcaagtgtcagttctgccacttaaaagtcatgtgaacctggcaagttgcctctcagagcctttgcctcctcagctataaaatgggcactttggaagggttttgtgtgaatctgcatgctctgaataggagagttctgaaggctgagggagaaggccacagtcagaggttaggcagcccctgtcaggggaacactgaggcaggcttctagggtaggaaggggtggcccctggcaggtagggctctctcttctctgggggactacccatgttccatgttgggtggcagcatgtgtgaccctgaggatgtcaaatacctcatccataaaacaaggataatactgcaccatgcaaagggcgaccaccttcaaggccctgcatgtcggtgggggacacagcggtgggccgcagcaagatcgtccccgtgatccccacttgccaggcccacctggtgccagaacacaggatgcactccgcagttgctcagtcctcccctcccgcagggccgggggctgcattctccgagtgggctgggtccgggaaacacccctcccttycccgcgggccatccctggtggagactgcccaggaacttyccagcgcctgccgcccccagccctggcatggccccgccgccgcctgggccctccccccgcattagctcttaagctgtgcaaatagacatcggagggagccctgttkaaagtatttagacgaaatgaaaaaaggctttcatcggcactaatgagccattcaggatgcctccccggtggattctctcccgctcccgcctccctgcccgcgccgccccgctayggcccctcttgggattggaggccccttcctcccaaccccagcctgggactccctgggaggaccgcttaccccgcctcacttcccagggcccagctgggtgagggtggagcggaggccacctgcgccccagccccaccagatctggatcgggatggggggcggggcccagcctgtgtttaggggaagccttaaggactggggcgtgttctagcgtccagctaggtaggtgttatggcctctgtcttatagatggggaaaccgaggctcagtgaggcccaggagcttgcccaggttcacagtggtggtgtgcggtggagctggagtcattacgcagtgccccagcctgggggaaccgccgaaccaggcagtggtgccacctcagggccagctggcttgccccttcagcgctgctgtttctgcagatctttctgtaccagtcagccagaaagccttgggttccaatcccaaatcgatgtgacactagctgtgtgacctgggcgggggctgcccactcaagcctctgtctgctcatctgtggagtgaagacatactgggtttggggagagctcatctatggacagacatatactgtcacccaccgcagcctctggaagggcaggtggcactgtctgtcactctggcagcccctgaagaggtgccaggcatttcccaagcctctggcccctctgaggtgggcagtcacgggaaccaaagttctgggacgagttcaggcctgatccccgcctcatggcagcaccaactgtcagcttcgggggagggcatgacagcgtgtgggtacaagggggagcctgagggacagggcgggcagggggcccactcctctgggttccagaggttaagctggcccagcacggggacaatgagaatttaatgggatccatttattatcccataaaagttaatgagtttattctgraggttccctggcccctttcaagttttaataggggattagtgagggcctggtccctgcagacccctattatccgagaacctgagggagctgagagtgcttgggccccccagakccagagtccctccttacagtgacaattccacgggcccagccctgccctctgtactgtgaggccccagctagaggctggcagggctatatagggccgctgggatctgaggcctagttctagaggcttccaattccatgcgcaactgaaataattaccccgacagtgtccagcacctgaggcaggtttgctgctatccatctgcttgtattgacagggaaagcaatataacccccatgagacagataaggaaagcaaggccctgagcagggatgtggctcctccaaggtcacccagaagctatggctgagccagaatggacacattctgtctcctgtggttggtagccaggaaactggggctggtaagagctgccattcacttactcggtgcccactgtgtgctgaccatgcactcagtgccctcatacgtaatttctcattctccccttgctccagggaggtttgggacattatcccaagagatgaagacactgaagcccagaatggttatgtaacttgtccaaggtcacgcagctaatgatggcagagcctcggactggaacccaaagctggacagccccatagctcagctgtctactgctcttgctggctttcggctgtagcacctggggcctcctatctccccaccaagctggacaccactatcctagcgcactcgtgccaggagccctgcagcttggatgatggggaagggtgttctggttgtgccctggaggggcagttgttgggttggacacagagatacactcaaaaggaacttctcatcgtcagaacaggtgccttccccgttttggccccaattgctcacgcgattctctctccttgccatggcttctctactcctttgtctctgcaaaacctccccatccttcacgggtcagttcctagcctcctctggagatccatccttgcctggcccttctcttgacctcctgggggcacttcctagtgggctcctaacacatgaatggcttgtgtccctgggcaaggatccagcagtgggtatctctcttcccatttctctacctggtgctaggcatagtgaaggctgggctcagggcacactgtttccaagccccgattctgcctctctgcacactcagaaggcaacctgctccccaaagtgcctakcccttggccagcaaggtgagcaggagtgggtcctgccaggagaagatgggcagccagcccttggccatgccccatcacagccccaactggcagttgatggggagtgtctgctggcacaagctgatgggtccccattgccccggactaccctctcttcccctgccactgatcatccccatcacagcctctcaccaccctctctttcttggtcaacccctgcagtccagtcaaatttggattgcaaatatgaatgggggcacctcctcttggccaggctccaagtggggcagtggctggttcccagaacatgagcccttgtagcatctcatccctccctcacttacccaagaggaaaccaagtccagggggttttcccaagtcacacagcaaacttggggcagggttgggactcaggatggggctgggacatctagcccaactactgggaagagtgaaccctccagtctggagctgtctkttatctgtgggcatacctccagggacagagaccccactgcctccttagccatcctggttggggacaggggtaactgtgggctttggcatctccagagttggggtctcactgtcacatggagggagcatgggtggaggtagtgggcaccagctaggagtcaggccatgctatcctcatcccacccctgacaagccaggtccctcagcacaaatcacttccacaacctgagtttccatatttttgtcagtaaaatgggtccctgccagttctcacattccaggatctagtgaaccatgaagggctctatgaataaaaatattgaatgctgctgtttactgagtatacatttaccacatgcccagcaacactctaagtgctttatcagaattaatccctataataactttatgagatgggaacttttattatcccattttgtagatgaggacactgagacccagggaaatgcattagcagtttggatgctaatgcagtctgattcaaacctgggttgtctagcctagagcagccctgtccaatagacctttgtgatgatggaaatatttttatttatttatcttatttttagagatgagggtcaagaccctatgttgcccagactgggcttgaaaccacctttgccaaaattataatggtgagaaaattatgacagtgaaatagatgtgatgtaaccaactccatcttacctttaacctccagactgcccttggtcattcctgggtatgggccaagctaactttgggagaaatttagtttatagtttaaatgataatagcccttcccaaaactaagccaccttttaaaaactaatgaaagaggccaggtgcggtggctcacacctgtaatcccagcactttgagaagccgaggtggggggatcacctgaggtcaggagttcgagaccagcctggtgaaacaacatggtgaaaccccatttctactaaaaatacaaaagttagctgggcgtggtggtgcacacctgtaatcccagctactcaggaagctaaggcaggagaatcacttgaatctgggaggcggaggttgcagtgagctgagatagcaccattgcactccatcctgggcgacaagagttaaactctgtcccctgcccacacacacacaaaaaaaagaatgaaagaccaccaggtttggaggctgagaggggcctgaattctgctgagatgtaggcatagttagcagccgttattctggaagtcacaagatttgcaactttcccaattactcctgtaaataacatcactatagtagaacctatgattggctttttgagatgtcttttcggacttttgcatttctttttttctttactctgtcacccagactggagtgcagtggcatggtcttggcttgctgcagccttgacctcccaggctcaggtgattctcccacctcagcctcctaagtagctgggattacaagcatgtgccaccacacccagacagttttttgtatttttagtagagatggggtttcaccatgttgcccaggctggtctagaactcctgaactcaagcaatctgcccacctcagcctcccaaagtgctgggattacaggtgtgagccactgtgcctggcaagacttttgcatttctgttgacaagatggctccacctggctcaagactcatgactcccgggtcctgcggcccccacccagaagtggactcagtgtaggaggaccattttccagacccctatgatttcatccccaaccaatcagcagcacccattccccatctcccggctataaaaaaaccctagcctccttcaggcttgaaagaagactcccgaataatagtaataataatataataataataaaagtaaaaaaccaaaaaaacaccaaaaccctagcctccaaatattcagggaggctgatttgagtagtaataaaactctggtctctcatttatttatttattaaaaaaawttttttttgagacagtctcactctgtcactcaggctggagtgcagtggcatgatctcgtctcactgcaacctctgcctcctgggttcaagcaattttcctgtctcagcctcccaagtagctgggactacaggcatgtgccaccatggccagctaatttttgtattttagtagggatgaggtttcgctgtgttggccaggctgatctcaaactcctgacctcaggtgatctacccgccttggcctcccaaaatgctgggattacaggcgtgagccaccactcccagcctccatttatttatttattgagacggaatctcgctctgtcaccgaggctggagtgcagtggcacgatcttggctcactgcaacctccgcctcctgggttcaagcgattctcctgcctcagcctcctgagtagctgggattgcaggcgcccgccactacgcctggctaatttttggtatttttagtagagacagggtttcaccatgttggccaggctggtctcgaactcctgacctcaggtgatcggcctgcctcggcctcccaaagtgctgggattacaggtatgagtcacagcgcccggccagtttacatttaaatagccacatgtggtcagtggctaccataatggaaagtgcatatccctacctgacttctcagccttacagtagtcacacctctcagtgaggaagagcccagggtggggctcctggaaaagagttaagatggggtgtctgctcccctcctttcgggtctgggaaaactgcggcttgggattggcagggagagatgacaaggagccctggacttcttcgagtttttcagaaaggcctcggggaactgggcgtagcagctactcattcctcagggaggattcttgtcatccaccgatgaggtttgcttcccaaacttggccgcgcacwggtgctctgagggttggatgtatgatgggcaattctggaagctcagagccagtttaggaggattttatgggtggaggacagccaggaacacttagcttcgtactttgccctcacatgtgtgttccaggggaacgtttgctgcgctctgttggcttgcccctgcctcactgcccagccagcagcaccgagggcagagtatctggcctggctactaccccagagcagctgcctggcctcgggcacaggagaggcactcacatttactgagcacctgctatgggctagccatgcacttcacaaagagctgtmttccacctagagtggcagccctttgtgcttggaatcaatagtttatgcttggcctatgaagaaactaaggctgagaggcaaagtgaatcctcctagttcacacagaggaaagtgacaaatagagtttgaaccgagtctgcctgttccatagcctgggatgaaaatgtctactgccttggctgctgcttcgtgtgagcatgtgtgcacgtgcgtgtgtgtgtgggcgtacgtgtgtgcatgagaccgggtgtgtgtgtgtgtgttcaagtgcatgtgcatgtgcaggtccaaatacatgcctgtgccacaagtcactaccatgtgtccctgcccaaggatgccacaccctgggacctggcttcaagcagtccccaagcccagaaaggccctaccccccaaaagaagggatatatttctctccaagctggctgttgtgcccctttttcactctgccctctccttggggcctgacctgacccgccccagggccatctgtcctggacagcgtctcaggctctgggtgggtgggggagggagagactagttggggctgcggctgggccagtcctctctcctccagtgtcccctccctcccatgaggctgtgaccaggggcccagggtagagagctcccagctaactgccacgttctctgcttttcaatttacagtctaatatggtctcgccactgcagagctgggggctggagaggtgatgaatgaggcctctgctcctgcgtcacctgctgcactctacaccgtcccctgcagacctgtgttcccttctcctgtttgcctgctggccctggggaccccagccctgcctgcccacagttcctcagactgggcaggtggcactggagctgggggcctggagtgggggttaggtgagagggagggactgaccttgaggtaggggcaggaatcgaccccagccyctggggtaggatggaaggaatggtcttcttggcatcacccctcaccagtctgataaataatcaatctgctgtacctcaccctgcttatgccacctcccaggagtgtggccagggcagagtcctagrtagggctggagctggggactgggcttcgttctctccctggaggygtttctgtccatcagctccttctgtccatctgctagccccaggccccttctcctacctgctatgttaggaggcagagaatgaggagctacccactggccccaaggtgggggtgtggagcaagtgggcagaagtatgtggccctgagctgggtgcgtgactcacagccctctccctgtgccagccacttctaccaccaccatatcagcagcagagaccatatttctctgaatggaaaatcttggaggtgtcagctgggacaaggaaggatgtggaggcaggagctgcattctccctagagccagtaccagggtcagctctgcccagtgcagtggtgaagttgggggacaggggttgatctagggaggaatagcatcccctccatcctttgccctactgcctcgctccacatacccaacaaagacagtccttcctagccatggagcccagcaagacagggccatgaggtgccagggccggagagtaggttccttcctgggccccaggccagcatctttggactactgccccctcccagcctctaccctgaggttcaaaaggccacaccactgaggctgttccagcacacgtgtccacttttgagctgaatcaccggcctggcagccccaagcctctgtggcctttgggttagatgaaggggcttgttttgtgcaccaggaccaaagttacctccctgactttgtgacctttgccctgtggttacttttgtctgctgcatctgggaggagatgaagttggagagcttgactgtagatggaggggccctaagcccagacccctgggctaccctgatgctgaggtgagctctggccactccctaccctgaaagtccctagcatgtctgttcttaggtgtggaagctgaggagcctggtgaggccttattagaaggcctcgagcatggatggagctctgccactgacaggctatgcgaccttgggtttgcccggcctctctgggcctggccggtttttcacacagtatttggttactgactttttttttttttcctttttggagacggagtctcactctgtcacccaggctggagtacagtggcataatcttggctcactgcaacctctgccgcccaggttcaagcgattctcttgcctcagcctcccgagtaggtgggagtacaggcgcctgccatagtgcccggctaatttttgtatttttattagagacagggtttcaccgtgttagccaggatggtcttgatctcttgacctcatgatccgcccgcctcagcctcccaaagtgctgggactacaggcgcccgccactgagcctggctaattttttgtattttttagtagagacggggtttcaccgtgttagccaggatggtctcgatctcctgaccttgtgatccacctgcctcggcctcccaaagtgctgggattacaggcgtaagccaccgcgtccggcccggttactgactttttagagagtcttttgggtgggtgggacatagtcactgaccctttattatcggtgctcaaccctgggggctgatggagcctccggatgggcaggggtagaggaggagggggcttggcatggtgggggactgtgctctgttgacttgccacttttcttttcttttttttttgagacagagtctcactctgtcgcctaggctggagtgcagtggtgcgatcttgactcatgcaagctccacctccagggttcactccgttctcctgcctcagcctcccgagtagctaggactacaggcacccaccaccatgcctggctaattttttgtattttgtagtacagacggggtttcaccgtgttagccaggatggtctcgatctcctgacctcgtgacccacccgccttggcctcccaaagtgcttggattacaggcgtgagccaccgcgcccggccgacttgtcacttttcttttgagtgtgctggagcctgtcacytcatctccctctgctgagcatctgcagggctaggctgtgtgtatgtgtttgtgtgtctgtgtgtgtgcacatgtgtatgtatgtaggtgtgtgagcatatttgtttgtgtgtctctgtgtgtgtgcatgtatgtgggggggggtgcattaggtgaggaataggagtcagggatggaggtgtgagaagagggcctggagagagcgctaagktttctgggcagctgctgtgtgctagactccatgctgccccatcatctacaccatctgattaatcgtctccatcccgcaggtggagaaacagggtctgagagctgacgtgacctgtgggaggtggtctagctgggcctgggaggcagaccctgggcatccttgtcctgctgagctcaagagacagacagaaggacagatgcaggaannnnnnnnnnnnnnnnnnnnnnnnnnnnnnnnnnnnnnnnnnnnnnnnnnnnnnnnnnnnnnnnnnnnnnnnnnnnnnnnnnnnnnnnnnnnnnnnnnnnnnnnnnnnnnnnnnnnnnnnnnnnnnnnnnnnnnnnnnnnnnnnnnnnnnnnnnnnnnnnnnnnnnnnnnnnnnnnnnnnnnnnnnnnnnnnnnnnnnnnnnnnnnnnnnnnnnnnnnnnnnnnnnnnnnnnnnnnnnnnnnnnnnnnnnnnnnnnnnnnnnnnnnnnnnnnnnnnnnnnnnnnnnnnnnnnnnnnnnnnnnnnnnnnnnnnnnnccgtggaattgtcactgtaaggagggactctggctctggggggcccaagcactctcagctccctcaggttctcggataataggggtctgcagggaccaggccctcactaatcccctattaaaacttgaaaggggccagggaacctccagaataaactcattaacttttatgggataataaatggatcccattaaattctcattgtccccgtgctgggccagccacaccccagctaattagctccagccttatttccaaatggcttagggaggagtcactggaggcctgggctctgcccttagggacttggcgaggttgtagaggcagagggaggtcatcgtgggacctctcccatcggcakgcaggaggaatgagcttckcctgccccagggtgtgggccctgagcctgtgggctatcccaggcaccttttgcctgaggggaaggggccccgcccacccagcactccagcccatgaggctggcctggcccttcacttccccagcaaacctgagtgggggaggggaggggtgcagagctgctaaaaatagctgcagmagctccagctatgagtctccttgaggggtcagtgaagcccaagattggggaggaagagactggagtgggctgcagggagggagagagaccagcctgggctggggcctggtgtaccttacacccaggccacagtcctaggatgcagggacagagggcacagacatgcagggacatgtgaacacagacactcaaggacaggtgaacgagccaggcagaaatgcacgtagacatggctaccagcacaactggggcttcctctccccagaacctcaggaacaccagatgggcccaactgcacagcccccagcctctcaggcctgtcccttgtctccaccttgttttgacctccaaggaccctgcagagctgggtgtgtggacaccttgagttgacagggctaagccctcctcccytgtctctttcagtctcctgtgtgtgcagcttagggtagggaaggaccaagggtcaccggaggcagcatcagggatagagttacagcacagaccagagttagggcaccaacaagtggctgtcggctcaggagcatcactcgacctgagcaacaggctctttctatcctggctggcaggcagagggaggcatgggagagaagtgattggacccagtagggcaggactggggctctgccaggagatgcgtgggaattgagggaagggggccaaggggatctagagaagtaaatgcatggatgaccactctcgtgcatgcgttgtttgatcccacattcacacctttgcccggagatgccccctttgccaggggctctttggtccacaaaagttgactccatgtcttacctttcctctaaccagccagaaaatagggcttcatgacaagagggggcctgccagctgctggaccagacatttcaaatcaccagcatatctctttgctagacgtaaatgatgcctaagacaatgtccatcagagcagcaagccagggtgaaggccttagaagcaccctgatcttggtccctctgcattgctagtctcaccttcttggacagacccaaaccagctggcgctcacccccactgctgcctcagcggtccagctctggactcctgggttgtatgattcagcccctccagagatgcctgacaaatcagcctctcctggtgatggacagttctggctgttggaggggctcctctcaaggggtcttgtggtttcttcccagtcaccatcccccccaccccgatttcctttgatcttcatgctgttctacaaaagaggtggggcagggacaggcatcatgaattctcaaggaaactgaggcttggggtgtgacacaacttgcccaaggtcacacagccagcaaaacccatcactgggtgtcctgactccctgaccagccttcttcctcttatgttcttcctttaggactcccccctcctccttgarcacaacttggctccccacactgcctgatgcctccctgcccccacccccaggctctgggactccttaggcacctgctggctggtgggacccaggccagacactcagcaggtggctgcctgggggacaaaggagttggcactcagctgctgagctgggagggagggagggaaggagagaggaagggagggaaggagaagctatggggagggaggagggatggggctggaagttgaggggagaagggtccgctttggtgtctttaacaaggagccatgagcaaaaaggggtaaaccagcatgcacatgagcatggggggcgctcagtggtttaggcacttttcacagtaaccccaagttctgtcctcccagactcatgaccagttagagggaggggcttgagggtagagagaagagcctgttgagaggggggatggagagactgagagagatgccaaggttgatgccacagtatcaaggttctggctgggccctggggacccaggggtagggagggatggcatgagaaggagggcattgtgaggagagattctgcagcacatgcgatttggtgctgcagaatccaagcagcgggtctcccccttctttccccaccacaaattcatgatgcctgtcctttttccagctctttaatggaacagcatcaggatcaaaggaaatcagtggggtggtgactgggaagaaaccagaagtcccccctaccccttgagaggagggtcctccaatagccagagctgtccagtggcaggagaggtcctgtacctgctcttcaggggcacacctgacctgccagagataggaagggttgtgatgaagggcacccatcatggattggcccagggaccccagaggcttgctgggtcgtcacagacccagaggcaaactcttttcctacaaatgagaaactgaggccttgagcggtccctggccaggagtctcctgtccttctggaggccagagtagctggatcatataggtgctgtttgtcatttcatctgtatctctttctattaaaatctaactggagagatagtcacaactgagcttattaaaaaggcagctctcctctaaactgagttccttaaggggagggactatgttatattcctcccaatcaaagcacctggtagctgttgaatagagggttgctgaatggagaatggaaggatggatggatggaggatggacaggctaagttctattggtgtttgggaaacagagagagccatctgggctgggtgatcaggaaaagaggggatgggagaaatgaaataagcagaaggacccaggatggccttccaggtatgaaaaaatggctgagcaaaactgtaggggatgagtgacacagggcatgctcagggtctaggattcaccctagcatcctcatggcatctttccactgccccccttcattcagtccctgctcatctcctggcagagccccttgttccagatggacccagccaggacttcccaccctaccccctcccttcctgccagactgcctgccagcaaggctgcaggctctgcagcctgagacctggagacccggattgttgttggagaatcggcaggtttgtggattgttgttggagaagccgcaggtttgtttgctccggagcccgcagagaaatcccaacaatcaatggccaacaacactctgcctgtggctgcagcatccatcctccccccacaggtctggtggtttgggcagcaggtaggcaggtggaaggaagctggggcagggttgggccttcccacctgggggctgggcctcagtggaggctgaaggggagaggtagggaagcccaggatgccaggacaggagtgactggtcctctcattcacaaagccctcaaaggactgaagagtaagagccaccccacatcactctgctctggcccaagacttcagggaccatagttcacctgactcccagccccttattctttcctgacctccaaatattggaaaggatgttttattcctttgccactaatgactgagaagcacctatcatcaccagaaatgtgctagaagaaagtgaagggctgtttatgtcttgggtctgtctgacaacatgggtttcaacttgattaataaaaggcagataataacttctatctcacagagatgataagagaactaaatgagctaatgtatacaaagcacttcgtacagcgcctggcacatagttggtaccatataaatgtttgctattattgttgttgctattatttggatagtgatactctcctgggttcccttctgcctgtagtgaagctctcccctatgccgggaaagtggacatagtgctagctgaagccaggttttgtgaaatgggcagacactttggagtagccttactacttactggctgtacagcctcagggtaagtgacttaatctcatcaaaactcagtttttccatgtgtaaaatgggaacaactaatatcttactgcgagtactaaatagaaaagtcatgtgaaacgcttgaccagtgaaggctgggcccctgaggattctgggccaggcctcacgtctcaatatatatctatggaatgaatgaatgaatgatggatggatgggtagatataccccagggcctgctcttttaggagttgtggacctgaattattgtggttctggatgattcttaggcctccacctctccattaaagggcatgtaggctcagagctgctcccaaagattcatgttggtccctgcaagctatgtgagagtgtctgaagctgggagatggatgagggggctatggagccagatgacatggattcatccttcccttacctcttagtgccagccaagtccattcgaggcatccctctcagccattaggggtagtgggtgggtgcttagggtggctgttatagggggggtggtcaggaatcctgggctttacctctgccaatacccacctgtgcaactctcattaatttattcaacatgtatttaatgtctgccatgtgctaggctttgtgtcactggggacacaagcagtggtggcactaaggggtgactggggagaggctttagcccattcagaatggccatcagcaccctatccctgagccacctcaggctgatggcgtgacagcttaatttgtagaaggaaaaaacgaagtaaaggctgtaatttacagttgggataattggccaactgttaggaaaggaaaaaaattctaacatacaatctatgtaaaaatagcatgcttgctacgcaaactcagcttcaagattcggtcccagctgccataggcccgcctcccctttctaaccaagcagctgaccctaaacttctcccaaacaggaattctagagcttccccaagacatagtgggtgaacaaaacagacttgggatcatctttgttgagtttagttttgctgctggagcatcaagcaaccagggacttgtgacctagcaagatggggacctggatgggggaagccaagggatggtgagagcacagaagagtcctctgacccaggctggaggacaggcctggctcccctgaggaaccatgtagtagatgctccttaaataggtactggagaattacaggaagtgtcagctaagctaatacttgaagcgtgaggtagagtgagccagattggtccgggaggggaaaggaatttcaggcagaaaggctgataagagcccaaaagctgttgagaacttggttcatttgacttggctaatttggaaaactgaagctaaaactcctttggcctggctgggtgggtcggcttcctggaattgccacttcctgttggaattggtcttggagacctcctagtgcctgcttcccaccacccagctgcagaccagtgctggcagcatagtctccgccagaaacctcttctgtatagaacctggctcctcctccctgagaataggccagtaagctggggacccagaaatctgcatgacttgacaagaactttgaggctctcctgtgctataaggcatggcaacttccattgaaggctccagagagtggaggcccagagaggacaggggtatatgtgagatcacatgggagcctgggttcttaaccacctggattgagaagttccttcactaatgtaactcctgcctaataggcccttttctgcaccctctttcttctttttttttttttttggtgggggtaggggtggggttggtagagtgctgagccatgacagctctgcccaggtgggggcacagcattcctgagctgatcccagcccagcagatggggcttaattgggctaggataggtggggacaaggagcacaggaagctggagggcctggaactggatggatggaggggctaaggaagcaggctttctgatatgctccccatatttaggcaggcatggtagtactggtggggaatggaagctcagtttctaattaagcccagcccttgtgtctccttgctctccattagtgccccacagtgtccccaaggcattttaagcggccaccctgctgaggaggccaggatggccgccagggcctgccaagcttagacctatgaggagcaaaaagccaactcaggcttctcctgtccatggcagtctctgggtcctccagcctccttggaagcccggggctggtgggtgggggtgtgctcctgcctgccatgtcaacctctgggtttctgaacagaatctggactgtctcccatggggccttgtccccagtaccacttcctgatcccgaagtgccaggctggggacaaggaacaggacctagtattggtttcagcagcagcccccagactcatggatgtgctgttagaatccagcacctaccaaggagtctgcaggaagcagcaattaccattttaggttaaggcagccctcgtttgttaacccttgcagcactagggctcctggaagctgagtcgtccttcctctcttttctcctccagaccttcccttccagacatcatccctcagttcttggcagagtgagtaacccagactagccatccccaggccccctctatcaccacattctcaagtggagctcagagaggtggagcagcaggtccaaggtcacacagccatggaggcagcctccattcctgagacccaaccttaccccagtctcagcggcttccaccttcataatctccctaggccacattcacacatgcagagtttaattaactttattgatattcagaaattaggagaatgactaaaggtaattgctcattaaaaatcattaaactgacacagcaggctcggcacacgcagccccttcaacaccgctttttcctccactgtggctggatggcccaggcaccccacacagcttgggaagataccccgtggcccaagacgcccctgatgcctgacgccaatcaagacttggaggctgcagaagggaataggggactgagcctgtgagcttgggccaagcccagcacgattttgccctacctccgcagcctcggcataccaggccttccaaggcatctgggccgtgcctggctacatcctgcagtctgcatcctgcctatgagcaaagctctgagggcctcatcagagaggtggcggggctgaaaggctgagggatgcacccctcgggccgaaaaggctcatagcctgaggtctttgctcctttaggctcgccttcacaaagctaaagtgcccaggaaccccgggatggccaaatgcgctgctccccactgagatgactcactatcccaatggttgggacctccagtccagccgaggagagaggagcctctggctacccagctctgacatcccagccctctcatcctcaggcttggcacttcggggctgcctcttcgtctcccttggggagtgaaaatagaggtctttcccaacagccagactcctaccccacatatcccactggcaggtgcctccatgggcactggagatcctgatagtcaggaagggacactgcccagggacacacagacttgaggccacagagtgagcagattcctcctaacactcacacccacatccccatcagggctggtgggactcctggccacaccagccttcctcctggattcccacagtctcactctagccctgcagggagctctctggctgaggctgcacccacacactagtggcctcacacagtcctcacacccattcactgctgacccctcacccaagattcggaccacttgaagtgcagacacactgggactggctcctctagtcatgcagggccctgattactctcacattcagacccacaaactcacacacaaggccttgactaactgccaggggacagacacaggccctgcgccccaggggagctgtccagcgccaggacccatcaggacccaagataggttcggaattcctagggacatccccaggcagctaggcagggattcacacttctccttcccggtcttcatccctggggtgggtcttgcaggactcttcccctctccccagaacgtgagcacacggtttcaagttctgggcgctgccggaggatccagcatgggcagcccggtagcggggtgaggacactgggctgtgtgcaagtggagctagaggctcagaaaaaggcttctgcgtctccggggccacagtttttcttcctggatgaagaaaactgccgtccgggggcccagcctgtccctggccgcgctgccttgacctcggcagcggcctggaaagatcgagcagggaggttagaaactcccaccctcacacttcacatcaggcccttcaaaccatatggcaagggatggcaggtctcaactccaagtgcggttctgccgaccctaccagcmtactgcagcgggagaaggacgtgggtgccagtagcttccatgagagcttgtttgagccaggacggcaggtccagacaagactcttccccgaggcacggaacccctatcctctccccaacactcccttgccgctcacaccatggccaagcttccctctacccaagaccgacgaagttggggaccagactcctagagggggcgcggggattctcagggtgtggggaacaggtcctccagagacaaatctgccttgcaggtggggagtggaccagggccgggcasgaaggcaggccgggagggaggcagagctcggggcagtggtgtgtgtgtgtgtgtgtgtgtgtgtgtgtgtgtgtgtacaaggaaaggactttggggaggacagagtctctatcccaggatctccgctgctgcagccgagggcagagccaggagccagatagggggtccaggcccttggagtttctctctagaattgtgctctaggtcccgactctggcgtggcagcgccagggcatggggaggtgagcgaggtcccaaccccgggtccggccgccatccggccccgtctcccctcagtaagaacactagaggccctggaaccggcggcaaagtcgagcgaagtttggcgggcggcaggggaagcgggaccacgggccgccagctggaccgtcccgactcactgccttgcgccccccggcacgcgccccagcaccctgagatgcctagagtgtggcgaggtagcgcgcgggtgagcgcgtgtgtgcggggagtgggtggcgtgatgaattgcatcagagaaatcccattagatctggggagatgattaaagacgaggtctcggccgggcgcgaatggcgggagccgcggcagcttcccgcccgcgaagcccgcgccccgcccggcttggccggcgccgggggcagcgcagccggcggggcgcggtgcttggactgggcagccagatgcccgaagctgggcaccgggtctcccttcccacccctggggccccgctcccgcccccgtcctgccgccggatgccggggtcccttaccgtgagccaggagcgccagcagcgagggcaggagcagcagggctaccgggcgcatggtgctggttgcggccgcgccctgggctgggaccgcggcgggagggcggggggcttggtggggcttgggcgcgggggcagagccgggtccggccgggtagagggagcggggccgcagccgtcaccgccgctgccgccgccagcgcctgacagaatcagcaccacggccagcgcctggcgacggcgccggggatcgccgagcggggctgggggcgggggcgcgggaggagcggcttaccgtaaagtctcatgcaaaggcgcagagacccaggggcaggagcccaggctcccgctccaccgcgactgccctactcatgtgggcacacggcccctgcccttctgcgctgcccacccccagccaagcatgccaccctctttcccgttaacggcctgctaaggaacctcaattaatagctcactgtagccttctgattctccatgagaaagagcaacactttccccacccctctccacccaatcctggtacctgagggcgtcaagggtgacctgggaagacatccgagagtgaggcagctggtgaggcccgcgtgcccttgtggcagttccgtcttgggacgataatgaagrtggcttttgagcgtacaaaggataataaattattactttgcgctcaataaatgccagggctccaggcagctgcatcagcagcaaactgtgctcacagaaaagcttaattatcctgatattatagttaaaagccagtggcactcgcatcctggggagacattcttcacttggcaggaggcaacctgggccaagctgtgggcagctgaaggtagtatcctgggtccccacgtagccctgggtctccaggactctgccttggcccctctgcaggaccagagaagccacagtgacagtcgatacagacccttcatgccatctctgcccaggtttctggaattggtggagaaaatggcataggcatgagagagggtttcctagagctgttattttattttattttattattgtttttagagacaggktctctgttgcttaggctggaaatgcagtggcacaattatattaatagctcacccaaactcctgggctcaagagatcctcccacttcagcctctcaagtagctagaactacaggcatgcacccccaagcctggctaatttttaaattttttgcagagataaggtctcattatgttgcccaaactggtcttgaaatcctggcctcaagagatcctcccgccttggcctcccaaagtgctgggattacaggcatgagccactgtgccctacggctgttttagatagagacttgaaggaggcccaggggtgtagcctgtactattaaaggcatggaaaaataactttccagggccctgcttgggctgaggagccccagtgagtcacaggacagcaagggggcagtcacagctgtgccatcctgaggctgctctttaaaggcaggggctcatggatgggctcacttgaagagctttaatgggtacaatgggacaggatcctatggctgatgttattattccctgtagaggaataggagggctgaactccctattgcccctgggagaagggcagttttttgtttagtttctttttacatgaacttggttgctctccaaagcttccagactccagtcattgtccagtgtccttcctgaccctcatcctggaagcaggtggtgaaatttctgctcaagttccttagagagtgttttggtcctcttgaccagagtctcccaactctgctggktggattctctccagaccctcttcttgtgggctctggggagctgtgatgactgctgtaaagagtcccaggcagcaggcagatggcgtgtggaattaggaagacgctgggatttctggacagttgttttgagaagctgaggaaaaagagggcagcagcagaaggatggcaggaagaaggaggagctgatgcaagaatcaggggtgaggagaggaagccaggaaagaaggtgcaagaggggaggcagaaagagagttgccaacagaggaagggaagagacacagaggtagaaggttgtgtgaccgggggaagtttaggaaaatgctggcaaatgtcatgagattcctcttttcctccttgaaagtattcctgggctcctctagtattcctggtccctcatggctaggcagcttgggcaaggggagtgagtcatgacctagggatgaatcttgtattgccaggatgattcatggggatttggaggttggtggcaggcttgtctgactctcttagcaacagggctccttgatgggctgggcactatgcacataaaggagggggagagaagccatcctggaacttgtcacatcaccttccctatggcctgaactaacctagagggtccaatggagactacaagtcccagaatacagtactgtaccctgagctcagaagatgggcttgtactgcatgatgggcatgacaatgcaccggggctgtccctccctcctaaaggcagttaacatagcctttatgcagtgggttcctaggcaggttgaggcagagcctgggccaaactgggaaacagcagagcttctgtcaggtgccctctatcatgccctccaaggggctcgtcctaaccagaccttgatattacctacaaattgagaacaataaaatgcccaaggggacaatcagctgtatacagggctggcaggcttatagtctactcaattcataggcacctttgaaagtggcagtctgggtggacttgcaaggctcccctcactgctctcacttctgttctctgcatcccccacctggctttttgctcccagagaaccctgggcttcccctgtctgtgtaattgcttgcttaattgtctgtctgctctactagttgttgactttgcgaaggcacagaccgtgtctgtctcatctacccacaatctagctcagtggctggcacatagtagatgttcaataaatatttgtgaataaacaacagggatgaggagtgtctaaagcccaaggccggtcattggtgtcaaatgagtgctgtgagataatgaagaaaagggcaattgtttcttttggggatgaggcaaggtcagtgaaatcttcacacaatggatgggtgaaaccaagttgaatatgtttttaaaaattaattaattaatttttgagacaggttcttactctgtcacccaggctgggatgcagtggtgtgatcagggctcactgcagccttgacttcctgggctgaagtgattctcccatctcagcctcctgaataactgggaccacaggcatgagccagcatgcccagctaattttttacttttttgtagagatgaggtctctgtatgtagtccaggctggtctcaaattcctgggctcaagtgatcctcccaccttggcctcccaaaggactgagattacaggcatgaaccactgcccctagcccaaataagtcttatgattcaatggagagggagagggaagacattcaaagttggggggtgtagtttatgcacagcgttggaaaatgcaagctagtctgggtcagtgagaagactggttctgctggagcagagtccctgctgggaagtaggagaaagggctagagtaggctggggcctagctgtgaatggcttggtggtcacctgagctgaaggacatccttggtggctatactgaagggattaccccatcacgaagatatttgcactgaaacagagcaatctggcatcattaaggtatgttttcaagcactgtggcaagtggtaggaactgtggggttcactgctgactccgaagccagggggtggggtgtgtgtctgagctacagtgactgaattaggtttgagagaccagagagagggaagaaggggctcttcaatcccagacaccccaacccctgcccagacaaagccagacatacatagagcccccatccatccattgaagctggagaagccagctttacttccccagttccaaacagcccatcaatctgtaggatcacaggcacattggtgacttattttgaagtctctgctgagatgacacttgctttctgcacgagaggaggagaaaattactctcttctaagacagctttcaaaccagagctatatcttttgtggagccaaaggggttttggtgtttcagggaggcaagggcakgggctgccacctcactccagaggctcccaggggttcagagctgcctgcttacctcaacccacttcatggagcaggattccagaccttgcagctcctggaacagtcagggatgccagtgctccagccagggctccctgcattacccaaagtcaacccattgaatttaggggcaggaggagggccctgctctgataaatggagagtcctggctccaggcatttgctcttgctccaggattgactgcaggaagagctcagggtagatggagacagcagcagaaagtggtttgatgtgagctactttmcatctccaaacagaggcctccagcctgcccaccacccccagccgaggcctttgatcctccacagctccataaatgtttaatgccaccggctgggcaggaatgaggcaggtgctgaaacagggagactggggataggacttaagacgtacaatgttggctagattattttcacataggagctctgggatggakgggaggaggctttcccccatcatgtggcaggagaagtcccagggttcaaatttggggcactaataaagaaaactctttgaaaactaccaaggggatgaaaataaatgaataatcaattgcaaaagcccaatctctggtttgattgaaggagaaagatggaaagttaaatgacaatcaaatgcaaatacagctcaacaaacaccacrgcaattaccaggcgcaggaaccacatggtgcttgcaggcagcgggggttggcaatttggaagcctgagcctgtgcagaggtgacgggcgaggggccattttaatggacggttaaatagatgcaaaaaaaccctgcatctactttgcatacactgctgatgagtggggtgctggaattctggcatccagagggaggttgttctaccttccgtggctgcctctgtatcatttcaggaggccctgagtacctgcggtggggtgaggccagagtgagctccagctcagatgatcagggagaaggctgcaccagtctcattggattcttcacaccagctggtgctgaaggttcaggggttgaagttgaaagaagccygtggggtcctycataaaggactcaaggtgctggccttccaacagcctggtaagagtggctttctcctctagatttgcataatgctttgcatctcatttgaatactattaatttggtgtcaggctaggttggcatggtgtaggaaagagaacagctggccttctccatcccctctgtaccacagagcttattctaagcatagccttctgcaactggggggcatgaggcctccactttcaccatccccttcatgttccctgacacttagtctcttagtgaagccagctcctaaaagccaaggctgcctggcattgtggccacctgcagggttatgctgaaggaagaagaaagggtcccccaaggtcactctcaccagacccagagacaccatgggaggatgctgggggcctttgtcatcccaagcaatcaaggcagcttggcttggaaagggtccaaagataataaccaagagagggagggaacaaagacaggcgataatcccagagaaatatagagggctctagaaataaaatcctctgaactcaatatttctagtgcttgaacttacataaaatacatctgtccagaggcattgggtttatggtgctgctctggggctgggaacctggtaccaggttgatggccatgtgatgagagagtgagtcaccaggtggggtgagttcctgagaaagagggaagaggccccgggtgcatcctgtgggctgcccctggcaggtgggcatcgggaggctacagggagatgcggatgagttatttaattgaagaggaagagaagtgcattccatgcagagggaacagcatgtacatcggtaggcaggactaagagatggttagtgtagctggatggcagcaaacaagagttgtggtgtgggatgtagctggagagctggggtgtagcaaagcttagtggctggtatgaaatctctaggagtcctacctgcccatccatctgtccatttattcgttcgtccttcaccctactacctcccaattcattcatcacccactcattcatttactgaatgagtgagcacttattgagcactgtgtgtatgccaggacctgaactagctactggagagggagagccctcaaggagcacccagactggggaggggaaacagccccaacaccctgtaagacagcatgtttatctccacaaggtacttaaacaaggctctggaagccctagaggccaagtctcccatgcttcaagcttcccaaggcaagggtccttcattacctccggggagatcttccattcacacagatcctcctggcatctaatactattccttcctgctacaaaagcagcccgcttcttatagccccagagtggcagggagtgtttctgatgttccttctcattgaccctttatttgggccttagagacatcacagtctcaggagaacccaggggaagtgatatgagaacatggtcaagtctcccttagacatcagaacccaggcttagatacacttctagccacttccttttctgggcatgaaaataggacagaaattcccaatgtcccttaattcagcatattccctcccccactcctccttgaactacttgtcctctatttgtgacatcacaatggtctctatggcaactgattgtgaggtcaccagtccttaaagcaacagaatatgtgggtccagacaatggcctgcaagagaaaggaagaatacaaaatggaagcctgggatagagatcatctcctaggaaagggggaggccacccaaggcctgtcagggggagggctccacttctcagcccatctgcagtaggtccacattcggggtaggcaagagcaaggcctgctggaaagggaaactgctcatcaagaaactgagggaggctgggcacggtggttcatgcctgtaatcccagcactctggaagtccaaggtgggtggatcacctgaggtcaggagttcgagaccagcctggccaacatggcaaaaccctgtctctactaaaaatacaaaaattagccgggtgtggtagtgcacgcctatagtctcagctactcaggaggctgaggcaggataatcgcttgaacctgagaggcggaggttgtggtgagccaagatcgtgccactgtactccagcctgggtgaaagagcaagactctctcaaaaaaaaaaaaaaaaaaaaggagaagtggaggattgagggtcatcctgagcattggctggayctcagaggcaggcctgagttcaaatcatcccaacctaatgtttgccttgggcaagttttggaacctccatttctttacctatgaaaggaaaatgatgccacttgcctttcagaaaagtattcagtgagataacctgttggagagcctggcacatagtaggtgcttgtttctatctacttgtacttgtttctatttctttttctaccccctcagcccttatgcctaggatcttgcatattatatgtgccttattaatgcttgcaattgtaagtgcactgtaagtgcaggatgagggctacagggcaatgtttagagcaggggaagtcaatggacctggattcaaatcctcgctctgctatttgctagctgtaagcctttgagcaaatcacctttctgtttcttggtttccttaactgtgaaatgggagatagcaatactgttgtcttcatagggttgattaggactaaatgagaccctgcaaataaatagcagagcttggcacatgaggtgcatggtacttaaacttgagtgaggctgtttctgcatgcgctgcacagtttgtgttcactgtcagttttcaggaaatgtgaattaatctgtggggtgtccagaaccggagagtgggtgaacctcaagacagggccataggatggcagtctctccccgaaaggggtgaccgctcactttctggattccctctagtgcggacacccagctcataccagtcacaggggctgggtgctccttgaagtcagagtgaactcatctatgaagcccagaccagggcctgacacatggcacaggctcagcaacagttaaggtaaactgagttagaggatatcttaataatatactggctaacatatattctgtgcatattctgtgccaggctctggtctaagcactttacattttgatcctcacaacaacctatgagctagatattatccatttttaaaatgtgggaacagagaggctaagtaatttgcccaaagtcacacaactagtaagcaatgacgaagctcggatttgaacccaggctacctggctctagaacctatgttcttaactaccacgttacccgcagccccatgggctgggtccatccattttactatatctgccaccacgaatttcctcccccagctctctcacttgcccctctcttctcccagctgagcccaggcccagtgcaactcaaagaatggaaattctcttccactagcctcagcaatctgcctccccctttgttgaaataaagccactgccacagccaaagccaccaccggatctcttgcttatttcaagtcctcctaaagcttgttgagttcttaacttattaaagataagcacatggaaatagggagcaaatctctttatttatgacataatctccagcccagaaaagcggcaggaacrgtgttgcctatattagggaaccaataggaaaaaaatcaattagatccgccagaccgtttcgctattaactttcttctgatgtttctcttaaggctggccatgggggtctccaccagcagctgaggtggagagagaggagagctttgtaggaacagagaaaggaatgtcacaaggaaggcagctgaccaggcttccagacagacaggggaatcttttcatcatggtctccttcactgctttccaaatctcatttaacctccatgtttcttgctgcaatttcagttggtgtctttaggggcaggggagtcaattggtcactgttggcttcttgcagacttgaaccccaagtctgaccacatttttgcaagacccatcgggagaaggatcctcccctttctgaaagaacaatattctggaggggctcttcttgactgatgtttagtaggctcttctgctggataattatgcctcaaacaaccccaagcagctaccgcatgaggtcttcacatccatctgcctgcctccaggagcactttctaagctatctcccagagatagggctcacccttattcctgagagcctccggtgaggagggtgccctagctcccatagtaaccccagaattagtctccttaaaggctggggatcatggcttgttcaatagtttttcttcaggttcgggcatatagaaggggctcaataaatagtcacagaatcaataactattacaaaagccccattgatggaatgctcgctccgtaccaaggctgagaagggtgatctgtcacccaaagtaggacccctttgttgctccctgaaccaacaacccagaagagcctgccagttttgtagttttgtttttccttttcttgctatttggccaggagcagcagtagcagcagctccaagaagtaagtattattattattattattattattattattatttgagacaggatctcactctgttatccaggctggagtatagtggcacaatcatggctcactgtagcctcaacctccccatgctcaggtgatcctcccatctcagcctcccaagtagctgggactataggcatgcaccaccacacccagctgatatttgtatttttttgttgttgttgagatggagtctcgctcttttgcccaggccggactgcagtggcgctgtctcggctcactgcaagctctgcctcccgggttcatgccattctcctgcctcagcctcctgagtagctgggactacaggcgcccgccaccgcaccctgctaattttttgtatttttagtagagatggggtttcaccatgttagccaagatggtctcgatctcctgacctygtgattcgcccgcctcggcctcccaaagtgctgggattataggtgtgagccaccgcgcccggcctatatttgtattttttgtagagatggggtttcaccatgttggccaggcagaggaggaagctgagtcaaggaggagcagtaacttgtccaggctaataagtgaattagatattctatgtccatccactgttggtcattaggaagttcttcttaaggtctaacctaaaccttttctgtttcagcagcactggctccttcttagtcccatggaagcacagatcaacatcattgcccttgcaaacttctctcagcttaggagagtctactcgctctttgcacattgttgacatgaaatgaatattaaacaccaaacctcatagaggccagccctgctgggcgagcaatgaaccaaccctcctcatgcctgttcattattataattaacattgagccgaggttggtggtgacctcgccctcgccaggtatttgggctgttttagcagcttattcagatcagtgacagacagctctgaatagataaactccccgccatccagacgaatcaattgcaacactgccgtcacaacaagcccaataaatcaatctgatttcaggcgacatggtaactcagtgctgggcaagctggttttaatttccgcgtggctgagacccagcttcctctactcactggagcacccctctttcccagctgatgctctgtgcacacaggtgcccagggccctcagaggactcaggccaagggggcagctacagggaggacagggtaaccaggaagctatgttactttgaggaagactcttgaacccccagacccagaagcagctgactcagatccactgctgggatccttgttttgctggcttcagcttcgattttccgctgccctttgcaaaaaaccaagcctggaggcctctctgggctgcctcccaaatcaggaagctgcagaggtaggctgcctatmtcaggcaccaggacaactgcctttttggtctgggagattgagtttgtctggcagggcaacaaaaaactcatcaggacagatgtagtcatgtattgggtgcctacttaatgcccaggcaccatgctaagcagtttatacacgtcatcttcttaacctttgtaacagcccaaagagatcagtggcaatgatccacattttgcagggaaggaaaacaaagctcaaagaggttaagtaacttgtcctgagtcacacagcttgtaagtggtagagcgtggatttgaactcatgtgtattagacttctgtgcctaagcttcagccaccacartctcctaaagatgacatcagaggtgcccatactctccccctggctagatattacctggttaagtaattcctactttagagaggaggaagcagattctgagaggagaagccagtgcatttcctctaggctcccagggaaggggagcctttctcatgaattcttacaatcagcaattgttccttgaattttcatctcaatgcttyaggtactgagtagaggatgttgaggaaagagagggtcaagaggctgagctggcctccttcccacaccccagctctgtcccaccccacttgcaccccatcacattaatagatctagatggtgaggtgaggggctgggacaggcagcagtgtgttaggagatgtggctttgaagtcagcagatctgggtccaaattctagcccaactacaacttatttgttgaatacacctgggcaagtctattaaccccttggaacttccctcatcctgtccataccgtggggataatattactcaaaccacaggttgtgcggattaagagggaaaattgcatgggaagtgcctggcataaagtgggtccttagtaggcattgggttctttccccctcttgtccctgctctttctgaaaccccatgccttaggtgcccagttctgaatggccgaggtcagggcatttcaaatatgttttagccaagaaactcttttgtttttttgagatggagtctcgctctgttgcccaagttggagtgtagtggcgtgatctcactgcaacctccacctcccaaagtcaagcgattctcctgccttagcctcccgagtagctgggactacaggcgtgtgccaccacgcccggctcatttttgtatttttagtagagatggagtttcactatgctggccaggctggtcttgaactcctgaccttgtgatctgcctgcctcagcctcccaaagtgctgggattacaggcgtgagctaccgcgcctggccagctaagaaactctttaatcaaaagacactttatgaagatggcaaggatacaaaatagataaagggggagttggtcagatggtgatagggggctgggagttctcctggcttgaacccctctctcaccctcagccccaaagcagccgctcaagtgctttcctcaagccctgggccagcacataaagggctgcctcactcttaggtgtcttaggtcacgggcttctcaggagctcagaagtgatcacctctggtgatttctggctccaacactatctctgagccaccagctaccttgaacctgttctggattcagggcatgacaatttaggtgccaaatgggcaaagctgcgtctggccatagggaggctgtatctggctgctccgggtgggaggtggggttgggcgtcgcagctgggagagccatagatctgggaaggggtgggcagatgacccaggattgtgcagggggtctctgtccatcttgggcagcaatggacctgtgggcttccatgggaagtagatgcctgttcaccaggtccagcacttaatatcctcccgagggaggcagggaccacaggaagtggaagcgcagtggggagagtgacatacaacaccatacagtgagcaagtgacagaagtgaattcaaacctaggcctgtgggctccagagggctgggactgccgttcattctctcctgtccatacagtggctgtcctctacccccagctctctgcagagaattatctatcagccctttcacccaccaaacacagaacatgaagagagaaacttaaattgtagcaggagggaatgggattagctactgggaaggacttcctgactcattagcttgtctctagaataggttattagagaggcagtgtgctctctctctttggagggatttcacatggggcttcagtgcagctgggcccctgtggcttccacttcctgaaagctactgagagacaagctgacccctgatgtgtatggctttgtttttcgtaacgtttattttttgaataggtaatacctgtacatggttcaaataataagggtataaaaggttgttcactgaactctccctccagcccccgtctccagcttcccctccccagaggcaagcaatgttacctgcttcctgtctagacctataagagcaaacacggacacatactctttcttgagtcctgcttttaatacacaagatgtagcatcccctgcaagctcttctgtgcctcgcttttgtcacctgacaatatatcttggagattactccgaatcagtacataaagagctgcctcactcttaggtgtctttttatggtcacggacttctcaggagctcagaaataatcacatctggtttgattagcttcacatttccatttacaacgtccctgcccagagaggcaagaaacctctccaaggtcacgcagcaaggactagggacgcgcagagtttctccccctcctcccgcctcagttcccagctcctgtcccccgccacctcgaggctgagcgccgcccaggtgaccagaagggagagggggaggtctctaattgaaatgccctccgcgctgcccatttgcgatcggcacctggaggggcgcgccgtgcacaatgagggcggggccgtggggctccgggtgcgggcggcggccgagtgcccacgtgggtgcaggctaggccgggctgatttccctggaaccccgcgccgcgtgcttccctgtaatgagctcccagggcccgaggtgagcttcctcggctgctcacacggcagccgcgtggcagcaaagaacacggggacttttttcttccgtgcctgacagctcattagaagaattaatttactctagcgtttgcagtttaaaggacattatttactggttaattgttgttattacaaaatgttaaatatcattatttatttcccaggccctgacagcttttctgacaggaatttattaggtgagactgtatcaccggtaggcacccctgtgcagggtagcctaagagtgggcagtttgcccctaggcctagctctctaggcagggcgggcactcctaggggcagaacaggaggggctgaaccctggcccaccccaggacaaaggatcattgtctcctcctcaccccccatttctgccccctgatgtgcgtgtgttggtggggcaggggggtgggggctggcagacggggggcatgccttgcataaagctgcagtttaggggtcaggctggcagttaccggaggcccagcggccagaatgaggtccagactttgagtccttccctttaaacagttacttacaagaatgttctcctctcctgaacgcacagaattgaagagctggaaggaagccaggtggtccgctggtgctgagactgcaaaccagtggcctccaggtggtaaatggcctatggacttgagtttgacctattcaagagacttcacataaaaatccactttgctggcttcccttgaaagatcagacaatcttgccacaagacttgacccacagtcttgcatcaattggcgatgatcagcgggcaagaagggcagcgctgtgcaaggagcatgcctgctctccaacaaagggagggtgccaccttccccctttgttgccttgtctacattattttcctggcctctgtgggcatttgagttttcaaccccgatctgctctactaatgaccatatatagatgaagacactgagcccagagaggttaagtctctgatggccaggacgacagccccactctacttttcttttcctttttttttttcttcttcttcttctttttgttttttttttaggatggagcaatcctttatttttatacactttgacaaggaggttttccataaacaatctttccagtgaggaacagagaacaggaaattcagcctccagacatcagcagctgctctgctcagggctgaggctcctccttgccaatgtggtgaggtggaggggtgtacttcccttcctttatcagcttatcctgctgcttcctgatggtacctgcacgtctcatcgttttctgccgaagcaaacactctacgaaatcatcagattctatcttgcactctttctctgcccggataacactgattccatatgcacattctatccattctttttcaaaagcatggcatcgagcagcaatcttgtagggctgttcagcactctggattgtccaccaytgatctatgttaaggccgaatcttttctggatggccaagaaaggcatggtgatccgatgctcatgtctttgtgtcttctctggccgccgcttcaggatgacccctagtctacttttcaccacactgtgctgctccctgaatttctctgctcccacctcctctgggtccagtttagagtgaattcagaccgggaacgcaggtcttcagcagcttcaggggcaggaacaagaggcagcmtagtgagaatttacaaggatcatggccttataaatagcatccacttattcattcagcaaacagtttctggggatctactacgtgatgtattaaaatgattaggacccaaattgtgttgttgaggaattagtctggggacactgttcatgaaacaagttgcacaatgacaatacaaggagatgtccgagtagtagaggcataggaagatgggattggtggggctggagagaattcatccttcatgcagcgttttctaggctggatggatggcctgcatcctcaaacacagacgcacatgtcttatttaattctcacaacacagcggattgaaaatatctgtcatcagcttataaataacggcyataccaggtctcggacttgctgtctagattcttcccccagggtgggtgcttgcaagcaactccagccctggggaccttctgttctagcaggtggcacccttgccatacagtctgttgactggcaaccacatctcataatcaggctgattaccctcattttacaagtgaggaacctgagactcagagacaggtgacagaagctgggtgttgacgggtgaaatgggccctgggaaggagagagagttgttgtctgagaccaacacccagccccgggaaatgtgggtcttgctggcagacttcaaacagtggccctttagacaaggtcttgggtcccatcctttcctccccaggaacctgacagcagtgggtagcctcaaggaaaatgtggagaaccaaagggagatgaaaagttcttcaaaaaagtatgaaaacaggttcaactgagccattactgttgctatgctgtatattattataaagttattcctgcctggcagcctggtttatgttagaccctacctcatttcttctaggttataggccctaattccttgtctggtgagaaagaaagagaccagcactattggagtgaatcctgagctgattcagaaactgtacagcttgaggaatttcacagattctcagtcagggcttgctgtcctttggaggtcttcaccacccccctcatttcattttattgccatattaaatttttaaaaatttaattcatttttggaataggtgatacgtgcccaaagtgcaaaattcaaaaggcataaaagagtatatggtgaacaggctttcccactgctcagaggcagccagtgccagcaattgcttctgtttcactgtttgcaaaaatagcattgtttctcttttccgttcacatagaaaatacagtaattcctgcagaagaaagtaaaaaatcatatgcaatccactatttggagttgaacattgaacattgttcacatttttggtgttcacatttcagccagccttttctctttgcaaagatacatgcatctatagtcataaacttgcataacctggttttattacttgtttacattaaatgtgattcttcaaaaatacagatcggagaggatacaaactaaactgataacaatgagtaccttggggaagaataatgagattgggtaaggattgaagggaaattttttagaatgaaaatatattgatacagtacttcctcctgttattcctctggaatctgattttaaatgactagatcagaaggctactatttaatcaatcctttattattgtggttttaggatgtttgcaagtcttcctattatagacaaacctgaratggacatttttgtatctttttgtaggttggagcaaaagtaattgctgttcttgccattgaaagtaatggcaaacccaatatatctttgcacacttatctagtatttccttgggggtgctttaagaaatggaactgctgggtcaaaggtggtatatactttatggctttttgatccatcacgtcaaatttccttccctctgggctgtcccaatctcctgttccacgggcagagcctgccccctactcccacatcagatttattcaacacagcacacgtgtaaggtctgtgagacagtgaggcaaactcatgggaggctggggaagcttcttcttggggtgaagaaccctaggatgctggcagcagcccagagggacctcagtggccaaagggaaaaggaggaggagcaatgaatgggtgtagaatccccaggcaggtggggcaggggcctccaccagtccaaatcacaaggccaaaagttgtacagcaacaacccaaggctggacttggatcctcaccagggacctaagcgccaccttctgcagtggcaccrcagagctaaaggcacagctgagatggttcctcttggagttcttctagcccatgagagttacatggcctcaagagcargcagacatggaggaccttctaggactggctccaactcctgccttctctaagtgtctcagatttgattccatgtctcctctttgcttccaggtgcttgtcactgcctaatacttgtggttgtcacccacagcctttgtactcttagrttctctggcaaattgacccatttcatttggaaagcttcagaagaaactgggcagacacaagacggacttgttgatttaattgaaaagatggtattctgaaagcaccccctcccctctggagcctggcatcttcacagtagctgaggwttcctcttgatggggcgaaaagagaaagcccaagattgcatctcattggtgagatgaataatacatttgaagcatctcacaaactgtgtttgatccgcctaaagcttcaaccgttaacgtatttctctttatccccagcaagggagggctgggaactgtcaacgttttcctttctgcctaatttgtgccttctccatgaagagaaaagcagggcctgggggagggaaggaggcaaggaaagagaagggtgacacacacctcctggaacaatgcagtgagccacaggactagggggtgttcctggggcttgggaacactggggggtcatcaggacacagcaaggggtggttggctctggggagaggggctgtgctatgtgtgctgggacctgtttgcaggactgtgtgcccctaagaagtcagtcccttggagggtccatctcctgtgtttctggtgggaaatcagaggtgggaaattgagccttgagccttgccagttgccaagcaccaaagatgcttccttcatctcatgggaagcagagagtaacagtgttaaaaactggccccctggccgggtgcggtggctcatgcctgtaatcccagcactttgggaggctgagaggtgcggatcacgaggtcaggagatygagaccatcctggctaacacggtgaaaccccatctctactaaacaaaatacaaaaaattagccaggcgtggtggcaggcgcctgtagtcccagctacttgggaggctgaggcaggagaatggcgtgaacccaagaagtggagcttgcagtgagccgagatcatgccactgcactctagcctgggcaacagagggagactccatctcaaaaaaaacaaaaaaaaaacttcccctgactgagctcagggacagcactgtgcctgtgtttttaccaacatgcttccagtcactcttcgtgtctctctgcaggccgaccttagtgctaaggatcctatccaaggtcagaccgagggtaagagtcaggctaccgggtccagaagttcacgttcttaagtgcagtgccattctccccctccctgagtcttcatgactttgcctacctaggctcctattctggaggagggtggttacgagcacagactctggaggaaggcggctgtgttctgaatcctctcaccaagcctcactttcctcgtgtgtaaaatggaggtgttaacaatagtaccgactccataggattgtggtgagattaaataagtaaatatactccggttctcagagcaattcctggagcataggatgcactgtgtgtattagctcatttgtatttttcccacttcaatgagctggtctacgtgtgtatgagctcttattcccagcctatttctattccacagtctggtagcagccacccctcccagctggccttgaacctatttcatctcccctcttgggacgaccatctctgttccagtccaccttatttcctagccctcttcctcccctgcccagcctggcttggggcgccaccatcagaccccgccacataaccctcattcgtggaagcttccctgagaccccccagagtaccgttgatgcatatcagattccaccaggtcttttgcctgagttcttcttttttctaaattaaaaaaaaaaagtattggttggtttgtttgctttttaagagatggggtcttgctgcattgcttaggctagatttgaactcctgggatcaagtgatcttcccacctcagcccctgagaagttgggactatatgcatgtgccactgtgcccagattaaaattttatttttaattgacaaataataattgtatatatatttatggggtacattgtgatacttttattttatttttattttagagacagggtcccactgtcacccaggctggagtgcagtggtgcgattatagttcccagcagtctcgaactcctagcagtcctcccgccttagcctcctgagtagctgggaccacaggcatgccgcaccgtgcctggctaattttattttgttttattttttgtagagatgggggtcttgctttgttgctcagactggtctcaaactcctggcctcaagcggtcctctcttctcagcctcccaaagttttggggttacagacatgagccactgtgcccggcctgatgtttcaatatatgtttacaatgtggaatgattaagtcaggctaattaacaaatccatcacatgatctcacttatatgtgaaatccaaaaaagttaaagtcatggaagtagagagtggaataatggtggctgggcgcggtggctcatgcctgtaatcccagcactctgggaggctgaggcgggcggatcacctgaggtcaggagtttgagaccagcctgaccaacatggagaagccccatctctactaaaaaatacaaaaaattagccgggcatggtggtaggcgcctgtaatcccagctacttgggaggcggagacaggagaatcacttgaacccaagaggctgacgttgcagtgagccaagattgcaccgctgtactccagcctgggtgacaagagcgaaactcaaaaaaaaaaaatgatggtcaccacaggctcagggagggggttggagagagaggaactgttgatcaaagggtacagagtgtgtggtttctagtaggtcctctcattcccatggacttcactgatttgggtggctcttttatctcctgtaatggccagtacaggaaacgcccattccctcagtaaccagcagcacactttcgcatgtgggagagcaccaagagagatgacatctctgggagggaaacagagtggatagtccccactggggaaggaacaagggaccgaggagtgagagggatgttcctaataactagcagtgcgtctccatcctaagtcactcattcctatacttcagtttcccagcctccttcctctgctgactccctgtggggaagctgctcattgtgtccaccctcagtcccccaagttgcagctgtgaactgggacttatgcgcagcagccaagagacacctcagaattcccaagtttggaacaggaggaaggagtctgccaaagcaagcggtgaaactagattttggagaggacttcaagtgtggatggtgagagggtggtcctggggaagggagacctctctcttcagggcaaggcaggcctggggtccctgcagcctggcctgcatgcctgcccagtgccccagagcccttctgttcaggcctggcatcccacagaggtggcattctgctcaggagcttagagcacagacgaagaggcaggcattgccaggaattgatttgcggaagcagcgggggctttctcttcctccttacttccttggtctttgatctcctgtcctccctccatagtccwttttccccctccttcccttgatttattcctctttttctttctttagctgaatcatagccactccctagaaggcaaaggctgggagaggcagttctttgtcctctttttcccttaactaggtgggtcctcgctgtccagatctcagcctcctacccaagtcatgaggcaggatttggccatggatggggaaaggagacacacacacacacacacacacacacacacacacacacacatatccaaggcaagagctgaaacaggcagaaaaatcaaggaaaaggggagaggcaaagagagaaagcgttcagccatcagaaagacagtaaaagacaagagttgagaagagtcagagacaacgaaaaaagagaattcagcaaattaaaaattttacaaccatccagcaagtctgcaaaaatgatcttccctgcggtctttcatttatctcattatctgactcctaatgtgctttttcccccctttcttttctcgccacacttggtgcaaaatcttattagatttttttttttttttctggcaggggcttcatatagtctttttcattacatttcctaataaaagcaatcactaggacggcatggctggaggattaaaaagccacctcagcagcctcctggccagcagaaccatgactcgccagagccttgttcacactgccaggggagtgggccagccccagcgggtcccgggtcagggaaacccaggctgtgctgtggaatgttccagggcacagataggttcaagatattatgggagaagaactgaaggaggggtcccttcccagagctattttagagcaggagtgacagacacctgtatttaacccagctgatcctggctaatttttgttcctgaggaaggaatattttgggtctttttctttggactttggcccactctgtcccatagcaaatttttatgaataacatcagtgatataaaatatttatctcccttttgttttgagatagggtctctcattctgtcacccaggctggagtgcagtggtgggatcttggctcactgcagccttaaccaccctggctcaagtgatcctcctgcctcagcctcccaagtagctacaggtgtgcaccaacacacccagctaatttttctatttttttgtagagacagagtttcaccgtgttgcccaggctggtcttgaactactgggccatggcctcccaaagtgctgggattgcaggcatgagccactatccccagccaaatctttaccttttgagtagattttattttgttaggtagacttttttttttttactgtgtataatacacataacatttacaatttgcaatttaaccattttaagggtacagttcagtggcattgagcacattcacacagccatcactgccatccatctccagaactttttcatcttcccaaaatggagatctctccccattatacactaactcccattccctctattgccagcccttggtaaccaatgtctactttttgtctatgaatttgtctatgtctattttaggtacctcatataaggagaatcataatatttctcgttttgtgtgtgccctgtttcacttaacataatatcctccaggttcacctgtgttgtagtatgtgtcagaatgccatttctttcttcttcttttcttctctatctttctttctttctttctttyttttttttttgacacaggatctcgttctgtcacccaggctggagtgcagtggtgtgatcacagctcactgcagcctcgacctcctgggctcaagcgatcctcctacctcagcctcccgagtagctgggactacaggctaccacacccgctaattttttcattttttgtagagatgagattttgccgtgttgcctaggctgggtcaccattttttttttaaggccaaataatatttcattgtatgaatatgtcacattttgtttatttcatcgtttttcaaaacagaaacattttcttttcttttttttgagacggggtctcgctctgtcgcccaggctggagtgcagtggcgcgatctcagctcagcgcaagctccgcctcccgggttcacgccattctcctgtctcagcctcctcagcagctgggactacaggcacacgccaccacgcctggctaatttttgtatttttagtacagacggggtttcaccgtgttagccaggatggtctcaatctcctgaccttgtgatccgcccgcctcggcctcccaaagtgctgggattacaggcgtgacccaccgtgcccggccaaaaacagaaacattttcacataaggaaagtgaaaagcagagaaaacccaccagattcccattaatacaatggttctctcatttctcttttgctaataattatacctccatcccatccccgaacaatcctgtcctcccagggctgctccaaacctctccaagaaagcagcttggcagagcatttggcatttggtaagggccaaaagttacggggaaacaggtctgataaatcaagttaaaggagagcaaggaaacccctataaagcagcaagacattttattgcctgggttataaattggcctgaaggtatttcacacatcagctccaggatgacttgggccacacattgagtaccactggattaactactcaacttcatacgggggagactttgaagagaaccatagtcatttggaaatatgtggtctggtatgttttaaaataaaggtacaataatcaagttaaaaacaacttttcaatgacttgttgctttgaaaccacttaggccacccctggttaaccgctgcatcccttgggtgctcagccagggctgcatgagttggtctcaatcagcacttctcaaagatccgagagcatcgcagatgtaggggaggtgcaagggaagccattattggaaaagtgtgcacgtggctacctggagtgctgcaagctgctcccagcagggtctccccagtctcaaccactggttcattggttcggtttatgatgatattactttgtatctgcatggtccattgggatccttttacgtttcatttctttccagtctcctctaggacccgttttcttttttttttttagacatagttttgctcttgtcgcctaggctggagtgcaatggtgccatctcagctcactgcaacctctgcatcccaggttcaagcaattctcctgcctcaaccacggcctcccgggttcaagtgattctcctgtgttagcctcccgactaggtgggattacaggtgcctgccaccatgcctggctaatttttgtatttttagtagagacggggtttcaccatgttggccaggctggtcttgaactcctgacctcaggtgatccgcccatctcggcctccccctaaagtgttgggattacaggtgtgagccaccgcacttggcctgtttttttctctttctttctttcttttttttttttttgagacagagtctcactctgttgcccaggctggaaggcaatgtcacgatcttggctcgctgaaacctccaccctctgggttcaagcaattctcctgcttcagcctcccgagtagctgggattacaggcgctcaccaccatgcctcgctaatttttttgtatttttagtagaaacagggtttcaccatgttggccaggctggtttcaaactcctgacctcaagtgatccacccacctcagcctcccaaagtgctaggattacaggaatgagccgtcatgcccgacctcctttgttctaagtctctgccagcctcatctctgtcccagactccagaagatagcagatcctgctcaggagcatagaagcccagaggtcacaaagacttcctcaccaagctcctttccttccctcttcttgtggcagagcccctgaaatgaaatatgaatttcgccacctttctgcataagcagaagtatttattctcttcttttcccctttccttttctttttttcttttgaggtggggtctcactctgtcggtctcactttcccgccttccactggtaccagccctttctggatcacaccctttctcttcttaagaagctgcctcctcccttccatcaatgctccagggggcttttatttttcttttattttcggctccctatcaatcaaggggagggggacactttatctgaacctttggtgagcaacagcagcaaccggcagctgccagggcagtgggaacttcattttcagcgctgacgtttataaatgtggcacagagtaccagtagggactggaaaaaatcaaacagcttctccagaggtccctaggggctgctttagaatttcttctcactgggggctccttctctttctttgcaggcatgggtgggggtggggaatgttatttgcaacgtggaatgagccacattctttccctatcttcacaaaagaacttagcaggacccaagacccagggtgctgaggagtgcgaacatctgcctcactcttgatttggagaaaggtttggggtgaggggtgggaatgctgactctgttgctttttagtgatcagttgcctcatctgcaaaatgggagtaaaaatgcctgcctgtccacttcacgaggctgctgtgaagatcaaatgagatgtctgtgagtgagtgccctgaaacctgcgacaagcttaggcaacctggcgggtggttatgaaggagcaatggtgaggagcagagttatccagcaccccagggcatctggagagctttgaacgggctctgggcagaccttccccggactattccaggaacctcctctttctctatccctttaaaaattctgggctaggatccctggtggtctgttccaaacacaactggaatcgtcccaatgtcttctctaaacctttcttcctctgtccttctaaacagcaagaaaataaatgtgggcaagcctgagaggtgagagactgagagagagaaagtgagagaaagaataaagctaagattccacttggaaaagggggctgccaaggatgaggtgggaagtgggtcgcagttggttaatataataccgcgctgctgagagctctgcaggggtcctttcaaggttctgtatgagaaccttgcttagtgagatgagacccagcatgggcccagcaatcccacttcctttacattctctaaattttccagatgctgcacacaacccttcacctgctttctggcgtttctgtggatttcactcctacccaggctgtggttgggagccaaggggcagacaggatgctggcaatgcctagagcccttccctgactcccatcaggactgcaatgatctgtacagtattttctcctaagtcatttcctatacgtagcaagattccacccagcttcactccccagaggcaactagtgttgccagtttcttactatcctcatagacagaaaatttattttctataaatatttgttcaacactttatttatagaggttaggcaccacaaaaaggaaggatgaacagaggaccatgcctgtctgtggatctgagcaattcagtgctggtgggcaattgctgcccattcattgaaacaaaagctgtaagcaggacccactcttagtggaaagcaattaaccttgggaggtcacagcctgcacctgcaccttatcaaaatattccttctttaaaacaaatatagtgattccctaaaaaacattctagacagcaagatgctcttctaaggtattccaattcatgatgacgctttagggttccatgtatattggcccctcagacaaagcctggctggtccacgcctaaatctagctctaagagtggctatcaagagattctcactcttgctccctaggaggtaggtggtcatccttgttgacaattgccactgtcttttttcaccctaggcatctggggaggaaggcatgaaggaaatgagagaccagtacacatgcagaagatactgcagagcttagatattctaggagctagtactctgattgcaaccaagttcagaagcttggcaatgacaggctgagttatttggaccgattatcccagtaaaaagaatgaaaaatgctagataaaatatcaacaacatcttaaaagccttgaagagttaataaaatagtaaggaattaacaggccaacatggaagagaaaactagaggatgcatagaaatcacttttccgttaaagagcatctgtcaattcttgcaaatctgaactttcattttgatggtctggtagagtaagggggttggaaatccaagcccagtgcctgctcattgtggagactgtagtagaagattctcccctcaatatgctgagacccccaaagggctacaccatcagggtaagggtaaaccaaagtaagctagccccattcacattgcctgggtactccagggaacctcaggctggcaactgggtttagatggttgtgccgctgatgcctggcagaaataaacacaatgtggtgtaaaagaaggcactttcataagaaaataattccaatatatttgttcaagcacagctaccagaataytgttaaagacagccaagcctataagaaaataaggctccatgagtgagactcagagaaacaagagacaaaataaaaaattcgtgaggacttcacacattaaaatgatcatacgtagactataatacaatcatgcttactgcagtcaaataaataaaagacaagcttgaaaatatttgcagggacaggaaattatgcaaggtaacaaaatggactaaagatatagtaacagcaattaaaactcaactcattaatttaaaaacagcttagatgcagtggaacagagagttagcaaagtagaagataataaggagaaattacctggaacacagcatagagattaaaaaaaaaagaggggagaatagagaagataagagatacagcatgcagagatctattgtatgtattttgcagaaagagggggaagaatgaatagggcagaggaacgtatttgaagagataatggctgagttttccaaagcacatgaaagacaccagtctacagattcaagaggtgtgaaattccaaacatgacagtcctgtctaaaccagcagccaggtgagagaggagggaggggtacagctgagccttcccagctctagcatgcttaaacttcccataaaaaccccagtgagaagaaaaagctctaggcttctcaacaagaagcaaagccttctggctttggcaccaaagattccctggctcttctaggcctttctcccttttccactgcctcaaggcctcttccctagctaggtcctggtttcctattatccatccatgaaggtcttcccttatttttatttagttatgttcttactctctctctctctttccttctttcttctccttcttctcctccttctcctccttctctttctccttcttcttcttcttcttcttcttcttcttcttcctttttttagagacaaggtcttgctatgtttcccaggctggactcaaactcctgggcttaagtgatcctccaatctcggcctccagagtagctgggactactgatgcatgccacaataccacgctaggctttaccttaaacctctctttctctcttgacttcaaaggaaggaaggggacccaaggcagaaacagaaaaaagaacagaataagaaacagtgagaaaaaagagtaagaaagatgtgtctgcaggcrtcgtggccgagagatgggccagactggcttaggggccagtctggaggcaacaagcagaaggtgggcactgaagaaggcttagaagttgttatccagaattctgctttcctttcctcctttttctcaggcttcccttggattctctgcctccatgaccctatggctggcgggatagtgtggggaagacctgagtttgcatatctgtctatgttccctaataaacagcgaaatcagcaggtctggctgcagagctaggaggggaagaccacatctacccagaaaggagactactagagggcccaatgctggagttaatcttcctgcatgctgctgaatttttgttgccctgttacctatcaagccaatccagctcatgcaaaagctgtttacttttcctgctcccaatttccactctttccccaactccccactttagggtatagtgatatccaggctgtgaggcacaagaaagacatggaaatgcatctctgcagagaagggagggaaagctgccaacaggggacacatacctcgtctccatcccagacacaccctcacctccacagagaaacaggaccacttctgagcactctgatttctcatttttcccactgcctgctgagctttaatggggccttctccaaaagcctaggggtagaaatatacacactcrgatgtacatgtgtatgaagacaccacttaatgaatacctggggatattttggggcaccacagtcagataagtgtgcaaatatggacatgtctttatgtaggattgacagagaaagacctggaaataaggctaagaagattccattgtttacctgctgggaagtttcgcctggagacagatgaaagccactccaccctccttttccttttgtctcagtgcatttccttttgtcccagtgaggtctgagggtgctcattcaygagtttatcctgcctgcccctcacttccaggctaaatcatgactttgtattttctcgaggttatggtcttagttcccaagacttttcttattttctgccctcccctggagtctgcctagcaactgtactcttgtatcttgagggagaagcattgactctaatatatgtcatttaacaaatacaaaggaagcagaaaccagggtctctgggtgttcaatcccctccacctcctggtctgaaggtgggtgctgtcctgggcactcacagagggcgctgtcagcctttgataaaccttgctgggccagcccagaacaggcatctcgccctccctgaacacccaatagcagacagctagagagctttgtgactcgagggcacctatgagagccagagaaactcactacctatcagtaaacaggagggggtgccttcttattcccaaatgtctcctacacaccatggaatactatgcagccgtcagggagaaggtgcccactcggtatgactgatgtggattgccaagataaagaaaatgaaaacaccagggtgttcttgtaccctacttttgagatgaataaaagagaatatactgtatatgtttgtctacccatgaacatctctggaaggacacaaaagaaaatagcaacagcgttgcttgcatctgatgaggagaactaagcagctgaggatagggtggaaacagacgtcctttccacagtggtctctttcgtacactatgttgttctatatgtatgtattacctacaaaaaaatgacaatgaaaakaaggctttttctccttaaagagcttgggggaaggcaggcatgcaaacaattacaatgcaatatgctcagtgttattgagatgcgcagggtgggaagggagtataggagagagactgtctaagggggcttgggggtgtcggggaatttggaagaatcacaccgaatgctaaaacctctctaggctcagcgttgcccgggcataaaggacacagtgagaagggacctgagacgaagctgcaagagcaggtagaggccagagtgtgaaccgccttgtgtgccaagctaaagaatttagattttatcctaataggaaataggcagctattaaataattttcagcagggagtgaccagttcagatttgctgtttagagagatgactctggcagggatgcggaggatagattaagaggggctaggatggggcggggagaaatgttttgaggttaatgcaataatttaggtaagagatggtgggtaggtgaccccgggggcaaagggagggaggatggcagagaagagattaaacctgagactcgaactgggccagcgatgtgtatagagaccacgcacaaagcctgctctgccgctctctgttttctcacgctggcatcctctgcacatttggatgccccagatgccccagcagctggcaggatgggtccagggagcccttcctggtctgcctgcctgcctccttgccccaggctccttggcaaagcagagcagggaaaagagaacagaagcgtttccctcgccatccaactcctaggtctctcatttattccttgctctctccggattcgggtcctctcattatttctgatctgtacagcttgccgcttccctggctcagctctcccacccccgtctgcaaagtgtcaatcaagccatcagatgagcagctcagcctcatatcctcagcgtctctgccccaggacacgagaagcgattgctgacacacacaagcagcaaggtgtaaggctgctggctctccctttaatagtcttccgatccagaatgggtgttaaaatggaatttgagtggatagcgtctctctgcctgtccctgtcaggacagccgcaaggacgggcaaccctgagagaaggggaagccttcagaagtcgattcgcttttcatttcaaggttgggccatggccagtgtctgctttcggaggagctgtttgaaattgttaatgagaagcagaatgcttgagtccaggaatccagggcagccttgtgaagtagggatggggaaatggaattgtcattttatctctgaagggatattgtattaaacaaagtgggggtgggggtatgggatacagagacgctttgtagcttccctggaggactgaacaataagaaatatcgagggcagcaggaagaactgagattagaacaaagagtgaaattccccaggccctggaaccaggggccagggagatttgaagcatctgcttccccgggggcttgctccttcttttacaaattgtgaatggatgtgtggtttttatagaatgtggcaactaatgagcatgaagctcaattactccaccaagttctctttcgatttttgatcgcacgtacacagaacacttggttgcagtgtgtgtgtgtgtgtctgtttgtgttctgcttgcctttctcagggttatctcatacacacatttctgcatagcagagtccagcttgttatttggaatagctacgtagtattccattgtgccagcgagccagagcttgttcagccattccttgtggttgagttatttcccatttttttatattgtaaaagcacagatatcaatatcttcatacctttgtctccccttgggatatggttccccaggttgaatttctaggtcagaaggtttgagctgttttacccggattgctgtgtattgcctcagccacctccaggagatcctgacaacccaaattgccaccctcctctatctctgtccccacagcactgacaacataagagattgtcatttttatttatttttgctaatttaataggcacataatagtaccttgaagttatttaattcccatttctttcattgctagtgagactgggcacacttccatgtgaggatttattgtctgcttttccttgtacgtaaactgttcatctcctctgacatcttatcaagagaaatctgggggctgatcttatatatttatatcaagcctttacatactcagatagtacatttttctcggttatgtcagccattttttattctggggagctgtccagttgtgatgtggatgctggcctgttccggggggtgggagtggcatatggagttgtgaggatttctggactcttgaaatatacatacatatatatatatatatatatatatatatatatatatatatattctggggttttttttttttagaagaaaaaaaagccaagcatggtaggttttgcttgtaacctagcactttttttttttttttttttttttttaggcaggcttgctctgtcgcccaggctggagtacagtggcacaatctcggttcactgcaacctccgcctcccgggttcaagggattgtcttgcctcagccacctgagtaggtgggattacaggcctgcactaccacacccagccaatttttgtatttttaagtagagacagggtttcgccatgttggccaggatggtcttgaactccttgcctctaaagatcctcccacctcgacctcccaaagtgataagataacaggcgtgagccatcgcacccagccagtcccagcactttgagaggcctacgtgggcagattgcttgagcccaggagtttgagaccagcctgggcagcatggcaaaactcttgtctctacaaaaaataagctgggcgtggtagtgcactcctgtggtcccagctactcagggggctgaggtgggaggatcagcagagcctgggaatttgagactgcagtgagctatgatcacaccactgcactccagcctgggtgacagactgaaatcctgtaacaggaaaaaaaaaaaaaagataaagaaaaatccagtccgatggcacctcctctctgggctcctgttttcctaagaacaaaagggctaggctgagaggacagccagttgccaagatcagtctgggggattacttgtggaatgagaagcattgctggcggccttggcaggccactgtaaggaggcagggcagctccctgtagtcatgtgggtttcctggaccattattttctcccactcattgtgggagaaatagcaaaatattgaaatcggaatcatcattacaagttctgactcatcctcagtaaagcacagtggttaaaggaacggattctggggcagacagacctaggttcacagttcagtgtctttcttttctttctttcttttttttttttttttttccatagagctggaatcttgctccattgcccaggctggagtacaatggtgtgattatagctcactgcagcctcaaactcctgggctcaagtgaccctcctgcctcagcctcccaagtaagtaagactacaggcatgcaccaccatccctggctaatttttaacattttttgtagagatgcggtcttgctatgttgcccagactggtctcaaacttctggcctcaagtgattctcccgcctcggcctctcaaagtgttgggattacagacgtgagccactgtgcccagcctcagtgtctttgtataccaggggtgttgctttgggtaagatagaatctctctaagccttcacgtcttcagccattaagtaatattttggttatggctgtgtaaaaaacctccccaaaatgttgtggctgaaaacaacaaccattttattctgtttcatggttttgtggatcaggaatgaagcttgactgggtgattcttctgcactatgcagcatcaattgggtcacttggtactatttggctggtgctaggctgggctggaggaaccaagatgacttcacttttctttgagacaaggtcttgctatgttgcacaggtttgtctggaactcctggcctcaagcgatccttcctgactcagcctcccaaaccaagataacttcattcttatatagagttctccacctggtcccaggtcctctccatgtgaactctcccatagggtgcctgcacttctaacatggtggctcagggctcagagagtaagggctccttggccaggtgcggtggctcatgcctgtaaccccagcactttgggaggccgaggtggtcggatcatgaggtcaggagttcgagaccagcctggccaatatggtgaaaccccgtctctactaaaaatatgaaaaattagctgggtgtagtggcgctcgcctgtaggcccagctactcgggaagctgaggcagaagaatcgcttgaacccacgagtcagaggttgcagtgagccaagatagtgccactgctctcctgcctggatgacaaaacgagactccctctcaaaaaaaaaaaaaaagtaagggctccaacataagaagaggaagctgccagtctctttagggctgtgccagaaagtgtcatggtatcacttttgccatattttatgggtcaagcagtcacagagtctgtgatagaaggagtgaaaaagaatttggggccatccttaatctgccaaaagtaggcataaaaatactcctaagccaggtgcagtgtctcacacctgtaatccaagcttttgggaggaygaggtgggaggattgtatgagtccaggagttcgagaccagcctgagcaacacagtgagccctcgtctctacaaaaaataaacaaaattagctgagcatggtggcatgcgtttgtagtttcagctactcgggcggctgaggtaggaggaccccttgagcccaggaagtggaggctacagtgagccgagttcgtgccactgcactccagcctgcgtgacagtgagatcccagagatcctctcaaaaaccaaaacttcaaaaacaaaaacccgcagaaactcctagggctatgaggagtaaatgagataactcatgcagaggcaaatttaccatgaagcaaatgaaacttcaaccatgggggtccttaattgaacagtttcttycacatccgggcatctaattttgtattaataattctccttttttctttttctcaaagagtaccctcgaactgtatgacaatcaagccctacccaaatgccagtatcagtacttactaagcatactgcctgggacagagagatgctcaacacggggcccctccaggcactgggctggcctggtcccctctctgtggctgaggagagggctcctcctctcactctgccctttctgtcttttcaggatcatttcttctttcttcaaaatgaaagtaaaacatgctgggaataatttcataattacaaaactgccctcccaattggcccctgcctctaccccctgacctcaccacccaccagggaggtgggtcttattctgggcatcgtgccaagttcttagcggggccctctagaatctctaaagcaaatcaggctgaagaggggaaaaccagcagggggaggcagcattcccggtgcccagtatggtytaggaggcattgaaattccagggccgaagtcctgagacaaagatcataatgagacaggaaggtggcaaaggaaggagcccatttgcatgacaataattgagccaagaatagaaagccacagggatgcaagggtgaggctggcggctgagctgggctaaacctcacaaatcagactacccagctctgctccgcaggggaagggagactgagccctgggccaggcttggcagagagggaagcgggaggacacgaccccagggcattgtgggaacactggccaggctggactttgccttcctcctcgtcctttagccgggagcctgtctttgcttgcctttgcctttgaggctctgtggctgtggggctgagtggcatcatggcggctcagaaagatctctgggacgccattgtgattggggcgggkatccagggctgcttcactgcataccacctggccaaacacaggaagaggatcctcctgctggagcaggtactgtgtcccttctgcacycccagctgtaaggactgtcctaccctcctcccctgcagaagggttttcagagccagcaggctacagggcaaggccaaagggactgaatcatcaaaaattctgtgtaatttgtatcttagctgcctagtgtgtttcatggcaattcaaagaagtttcacatccctcatacccacattgggtttctaggcacatttcctctttctactgcttcccagttcctgcccttgaccaagcgtcctaggccctgttctcttccttctcactactctttcccttctgtgcccaaatggttgatccccaccccagaaaaataattggttctgctctaggtaacctaaagtaaagataattttgcctagaggcaaaggttgatttatcagcctaagaggtaggattctgtcttgcatattcctggcctctcacaccagaacccagcagaagcttctgktttttttttttattttttattttttgccacctccagataatagcagcctccttgtttgacacatgataagtgagactgaggccttatttttcctgctacgcagtgcagtctgcagtgaccactgcatatgtgggtgggccctgtgtgtctgcagggtccttcgaggacagggccacccagctatccactgcagtggactctccctttccattctgcctgcagctacccaggctggctatggtttgctcttcttggtaatgagccagagtagttagaaaccttcttcatttctctatcagttttctcaaagcccaagggattcctggttcatcctctcaggaaactcattgttgctgaatcctgaggtggttctcttaccctgagtgatctgtagccacagagaaataaagtcagcatcagtttccttgttcataaaatgaaggggctggagtagttgaactggaaggttttttctaattttgcttctttgtgaatctaagtgaggtgagattgcagcaggatggttgaagactagctaacaaaagaacttctggatgtgaacaacgttagcaaaaaggaagcctaagttagtgctattgaagaacttctatcttgattgccaagtcagtaaattggtcataaagagagaatttggaaagattgtgtgaatttttttttgtggggggacaggatctcactctattgcacgggctggagtgcagtggtactatcatagttcactacagcctcaaactcctgggctcaaacagtcctcctacctcagccttccaagtagctgggactacaagtgccaccacacctgatagtttttaaatttttgagaagactgggtcttgctatattgcctaagctggtcttgaattcctgggctcaaattatcttcctgtgcataatccttccccagattgtgtggaaatatttgaaggataaatggctcctggttgacagcacatgctgatatggctcttaacaggggatgcagtgtgaggggtaatggcttccatcatctctcttgttttccacttccagttctttctaccacactcccgaggaagctcccatggacaaagccggataatccgaaaggcgtacctggaagacttttacacccggatgatgcatgagtgctatcagatatgggcccagctggagcacgaggctggaacccaattgcacaggtgggctgtgggaggaattccttgaatcgtggggctctgcacctgcaggtacttttagtgtgtgaagtggcagcgccatggaacatttggaatgcaatgggagggacacaaggcctcaagaagtaccagatgcatggaagagttctgctgtcatggtggtcaccccacaggtccagctgactctggccaggctctgcgttgcaggactgggttcagaccatgtgtccaaggctagcagaagcagtactggaaagcctgctggcaaggcaccgtgtggcagatgcccagagtggacaggagtctgctggagtgtgtattttcaactctgtggaggcctctgcaactcttttagggcaggggttgagatagaggaggaggctgctttcaggaggattcttttttttttttttttttttttttttttgacagagtctcgcttttttgtcaggctggagtgtagtggcgccatcttggctcactgcaacctccacctcccgggttcaagtgattcttctgcttcagcctcccgggcagctgggactacaggtgcgcaccaccacacccagctaatttttgtatttttagtagagacagggtttcaccatgttggccaggatggtcttgatctctcgacctcatgatctgcccttctcggcccccctaagtactgggattacaggtgtgagccaccgtgcctggcccaggattctttatagtcaaatcaacatcctaacttttcctgaggggtcctcaccccctttagcagccctataaacccattttgttctctctgagtaccttttcctgtaggaacaaaatggggacgttccccaggctggattgcttgccagggagtgagcctccacgtctttctctgctgccttcatggctctctccaacccttgacctttcaaacactcatgggaaagaaagccaataatctgtgatgcaatgggaactttaaccatcccacctccctcccacctcctctgtgactcttaactgaacttcctacaaaccctggctctacctgatagggtggtggttattttaatggccaggaaccaagaggttagtgttctgttgcaaaaataccattaacttaagaacaaagtgaaatccattatgcaaatcagccagggcagctaattacagatttattcagaggcagctaatgcacccagcacccaaataaaggagcatgtcttgctggtgggtggcccggcagagggacccctctctgtcagttgtctgtgaatactgctgagcatcttttgctaaaagaatcgccctgggcctcagagggcacacttcctcctagcacacaatgaggcaactaagagacgttagagtgtctggaatctttccgagggagacgattctggagtgagacaggcttaggtttgacattgtgctctattccacaccagttgtgtgatcttggaaaagtttcttgacttctctgtgcctcactttttacgatagggctctgagaggattaaatgagacttttgtgaaatacttggcccaatgtctagcacctttcaataaggggcagtcccttattgacccattctgggtcagctgcattctgttccattgagcaacagtgggaggaaaggcaggaggagacagatgggtgcaacaaccacagataccaaggggagtggcagcaggaaagagggagagggatccttgggtaggagactctcagaagcgcacaatcctcctctttgccaggaggacaggaatttggacgggctttggaactggacctggctctaaatctcagctctgacacgctcagctgtgtggtttggaacgagctgttgaacctctggtgagactcagcttttttcatctgtgaagtagggatactaatacctgtgtcatggtgctggggtgaggataagtaggtaatgggcttagaacagcacctggaaaaccatcttcctcctcctcctcaccatatatgtagtgtttacaataagaaactaggctgggcatggtggctcacgcctgtaatcccagcactttgggaggctgaggcaggtggatcacctgaagtcaggagttaaaaaccagcctggccaacatggtgaaaccccgcctctactaaaaatacaaaaagtagccaggcatggtggtggacacctgtaatcacagctattagggaggctgatgaggcagaagaatcgcttgaacctgggaggcagaggttgcagtgagccgagatcacgccactgcactgcactccagcctgggtgacagagtgagactccgtctcaaagaaaaaaaaagaaaagaaaagaaaagaaaaaactaagagttgcctaagtacctgacacctataactcattccattctcctcacaatcttatgagagggttgctgccgggtagtcagggtcttatcccattaatgcaaatcacagaattactatactcttaagtctagaatagaggttggccagctttatctataaatggccacgtagtaagtatcttagcctttgcaggcaacgtggtctctgttacaattattcaactctgccattgtagtgtgaaagcaagatgtaaataaatgagcctggatgtattctaatacaactttatttatagacactgaaatttgaacttcatataattttcatgtgtcactcaacattattcttctttggattaaaaaaaatcaacaattaaaaaatttaaaaaccatcttggctcatggaccagaccaaaacaagcagaaggccagatttggtccctgagtggtagcttgctggccctgggtgtggaagatacctcaaactggttaacttgtccatttctgtctccaaataagttcatgcctaaatcatcccaggtcaaaagactgctactatgcatttaaagacagggaaatatcacagcccttcttaaaagaccattctgatgtctcatagccccagttacgaaaaatgaaaagtaatgtgaatatgctttaaaaacctctagagtgctaagtattcttactactattgttattattctattattataagtcctttcttatggctaacctaatgtactcaggcacaccaatttatttggttcttttacttagcagggacacagagcagatacttcccattctcagaatggtatctgaatacagctctactacctttgggctaaaagccattctaattcctttagcttttactgattcttattttctaaatgattcatcatctgtgtggttcttacttttccccaggtttttctagaagaaccagcacaataccataatactactgatagatatgagcatacttaatgctatttgatgatgattaaaaaaaaacctttaggagttggcagttcaggtggttgtccagtgcttttcattctgtttagctgcttcctgtgacagcggcatactaaacatgggtgggtttgggacatttgcatatattctgggaacagacaatgacacatgtgtcagatcacaaggtctgaatcttttgtgatgtgtacagccaggatgctgattccaacagcaaaacccagctccctggcccatctctttcctgccccgccttctccctttgagtcctactgtctagctcctgacctgggctgcccctgcttagctgacagtatcagacaagatcacagccgtaggcagtacagctgctggcagaacctggtggccccctctgcagctgctgtttcttgtgtctgcgaagtgtctggcttgtcagccacatcccctccctggagcagtctttgttaaccaattccacctcggcccactgaacggaagatgaaatgcctagagctcctccaaaaccaacaaaggcagcagccattaccaagtccccattcgaatcccttccccaaggtgactcagagctggcttgctgggcatttttaacccacagaggggagagctgaagcttgggatgggagatggcaggtgcagggagagccgtctcctctcccaattcctccccactccatcctacaccctgtcctgctacagtaactggtggaaatccctgatcaccaactccctacatcatatctgaggcattagtcgggctatagcagagtcaacaaggccctcgggaggaatcttcaattacctcttcctagtgctggatcaagctagggtcaggaggaaggaatagttcatactaaatgctcttgactcagctgatgggcattctgggaggtgggagctgcactcttttctagggttccctggcaacccatgtgctggctttcagtccttctttgtagctagtcctgaccattcatttcccggtcattttttatcctgctgatgcccttgtctcctctcacccttctccttcccaaacttacagcccaggtctaagcagaaaaaaagaagacagggaggccacgaacacaggggtgagaaattgatgcagaatgagcagtctatttgttggtatctagaaaaagccattaagaaaataagcacttaaatgattttcaatctgcccatggaagccatccatcttcatactgggaggaaaaggcccattctccaatcccggttttgactgactggtttccaattctctaagcatttcccataggagcctctcacctatctcccataatcacaggcctttgcatttccaggcagtgttttacatttatttccgatttgctcataatggtcaaaaatctctctccaatccaaggcatttctccagcagcgcacggtttccctcaggccaaatagctcagctgtgatccacggaaaatgagaatttcccaaacacatcttcggactaggggagggtctggcatcacacattcagatggaaaatttcccactgttatatcaatatctgggctaagaaagaaatgccacaggggcagagagctggagcaaaatgattacaatcggcacaattacattcaccggcagaatcagctcgctgattactcccagggatggggagctcccgcttcatccaccacaggatggcttgggaattagaacatcactcagcatttcataattcaacagatatgcccgttgtcttggcatgagttcatttttcccacatagtacatccctgtaagaggagtcatttcaaggaaagaaggaaagaaggaggaaagaaaggaggaagaaacaatggaaaaagggaaaggaaatctcagagtatatgagaggccaaagctggtatattgcaggcagagattagaatatgctgctctggaatttccaggtcagggatttyacattacatctgcttaggtgtggtttaagccaggtctgtcccagaatccctcccagccaggaccccattgggtaaaaaggactcaaggaaatacacctgagtgacttcatacttatttgttgagtaagaagtttactagggccgggcacagtggctcatcttataatcctagcactttgggagatcaagacagaaggatcgcttgaggccgggagtttgagataggcctgggcaacatactgtgtgactcttgtgtctacaaaacacaaaaaattcgccaagtgtggtggctcacgcctgtagtctgtagtcccaaatatttgggaggccaaggcaggaggattgcttgaggccaggagtttgagataggcctctgcaacacagcgagacccctatttctatacacacaaaaaattagccaagtgtggtggcatgtgcctgtagccctagaaacttggagggctgaggcaggaggagctcgcttgcggctgcagtgagctgtgaacgtgccactgcaccccagcctgggtgatagagtgagaccccatctccattaaaaaaaaaaaagaaaaagaaaaaaaagtttggccaggtgcagtggcccctgcctgtaatctcagcactttgtgaggctgaggtgggcagatcatgaggtcaggagttcgaaaccagcctggccaacaaggctcaatacaaaaatgagccgggtrtggtggtgagcgcctgtaatctcagctactccagaggctgaggcaggagaattgcttacacccgggggcagaggttgcagtgacctgagatcgcaccactgcactccagcctggatgacagagcaagactctgtcttgggaaaaaaaaaaagtttactaggtaagttttcattacctctgaaccaatctgaagtccttttgggggccacagaaaaaagacagtcagctgagagcagggatttccactgcatctttcctctgttgagcttcgaagaggcagagctctcgttgctatctcgctggtggtgaatgctgggtaggcgggggccatggcaaatggattgggcacgctgcgcggctctgtgtactgacacccgccccagggcccacggtgtccctaccccctcccaatcttctctttaatccccccaaccagataatgtgggatttggaagcatgtaatatccatgagactccattataggctattacgagctttacacccactacctgggggatgtaccaggccgctgctgggcagtgcagcagctgcaatggagaaggaccacgggaacagtcccaaaggccagagtgactcttccattgtttctatccgtttccccccaaaagggagctctggtctcttgtgacagagaggcaggaagcatgaaagagaaacagctttcactcccttagggagtaaaagcatagagggaggtacagggagaaacaaaatcacagtcactgagtgtattggtggagccctaggagaccatctatcggtgtttctgcatgagaacaccactggaatttggggtggaatcttctcgagcattgcaggtgtagcatcccgggcccctgcccactaaatgtgagaggcagcaccaggcattgtgccaactacaaaaatggatcatgccattttcagttgtccctgggtgggcgggtgagtgggcggtaccaccctggtgtggaaccatcagttgttcaacaggcacgttacagaggaggaatctgggcccagagaggtgagtgacctaatcaaggtcatgggcaaggtgaagccaggactagagacagagccagatctctcagtttaggaccctttccacaaaacagrcagcctctgaggaatgagagacagagacagacacacaggaagggacaaacatatatgacaagaaagaaaaagagggaagcggggagggcaggggagaatacagaacagagagatcaaaatagtgaatgggatcaggggacaggaggaagggaagaaatttcatcaaactgactgaacttccaccacttccaagccatgggacatgaaagaggacttaggatctctgccctcaagggcaggatgggtcctgagaaggggcatagaggacaagaaaaccaatagtgagagcccaagggcagacttgggaatgggctggaaatcagcatgagaatactgggattctaccgactgaatctagatggcttcacctcttctctgaacatgaggccatgactcctctcagggcctacacctggacccgagatccctcctgaaggagagcaaatggcccagggctttgctttgttttgctttgagacaggggcttgctctctcatccaggctggagtgcagtggtgcaatcatggctcactgcaaccctgacctccctggctaaagtgatcctctcacctcagcctcccaaatagctgggatcacaggcatgtgacaccatgcttggctactttttaaaaattttttactttttgcagagacagggtctcatgatattgcccaggctgctagtgaacaaattagtggcctcaagtcatcctcctgcctcagcctcctgaagtgctgggattacaggcgtgagtcgtcacatcaggcccaggattttgaaacacaccttcacctaggtgacttattttttaacaggcagactggattactgctgctgggaatgaaagagaatcaagaattaaagacaatccaggccaatctgtcgaggcagagggtagaacaccagtgtctttcatctgaggaactgaagcaacgtttcccaaatattcggttgcccaggggagaagtggggctcttggacaattccggaggagttatctatgcatataaggccctcagagccctgcaggtaatgtcgtatagcactggggcgatgcaggtgctccctgctctgggygtcctgggtcccaagcagccagcccaagacccccctctggatgaggcctttgccctgcaggctttagtcttgacttttccagcagggcagtgaaatatatgcggctggccttgtcaatacaggacaggtctagattctgcactcttttctgccccaggcaaaaggctttctgtccaccagggtgaaccacatacagaactaattcacctttccctgctcctgccctttcaggatgcaattcgacagctaggaggcatagtgcgtgacggagagaaggtggtggagataaacccagggctactggtcacggtgaaaaccacctccaggagctaccaagctaagagcttggtcatcacagcaggtccttggaccaaccagctcctccgtcccctgggcattgagatgcctctccaggtaagaggagctggaagcccgagagttggtgctcaagagaagccttggaaccagatggagtcaaatttgagtcctggatctgcctcttgctagtggacaaccttgggcacattcattcacctcaccgagcctcagttttatcatctgtaatatgggggatgatagctacctcatagggctgttggagaattaaattattaggctggtgcaaaagtaattgcagttttaccgttcaaagtcatggcaaaaaccacaattacttttgcactaacctaatatatgctgtatataaagcctttaagaggccggatgtggtggctgacacctgtaattccagcactctggaagaccaaagcaggagaatttcttgagcccaggagttcaagaccagcctgggcaatatggcgagaccctgtttctacaaaaactaagaaaaattagccaggtgtagtggcgtgtgcttgtagtcccagctacttgggaggctgagcccaggaggctggcctgagcccaggaggttgaggctgcaatgagtcgtgattctaccactgcattccagtctgggtgacagagcaagaccctgtctcaataaaataaaataaaataaaataaaaataaagcccttaggacataacctggcttatagtaagcactcaataaacctgaggtcttattaattcccgaaaagagacagaaatatggctgggggctgggtgtagttatgggagaaaactaagaatgggagaagagacagaggctcagagatgtttgtgcatcataacacatgtaacaggtaaacaacatgagaagtgggagagacaaacatggatgagttcaactgggtgtccaggcttgtgttagagggccgcaggggcccagagaaactgctttcattgctgtagagttccatggcttttyttcatttcccacttcctctccctgcctcaagaccctgcggatcaacgtgtgttactggcgagagatggttcctgggagctatggtgtgtcccaggcctttccgtgcttcctgtggctgggcttgtgtccccaccacatctacggactgcccacaggagagtacccagggctgatgaaggtgagcggaaagaccgagataaggcaggtagatgccagtgcagattaggggaagctgctctaactttcccctccatagatgcccytgggtctcggggccagcagcaggagcctgcttcactcatggcgatttgcaaggaaagaccctcagctgccctgaggcccagcaaaaggagcccttcctttgcaaacatagggtggttgcagggaccaacagctaagcagcctcaggtgacagcccacagcacctgccakgagtggggaaggctggaatgatggatggggctgtcctgtgtacacgcctgyccttcggctgtgggtgtgtgtggaaggccagccctcaccactcatgmcactctgattgggagccaggtcagctatcaccacggcaaccacgcagaccctgaggagcgggactgccccacagcacgcacagacatcggagacgtccagatcctgagcagctttgtcagagatcacttacctgatctgaagcccgagcctgctgtcattgagagctgcatgtacacggtaaggggtctgggcagccttgctgggccccctcaccactctacagaagggaagaaggagacagaccttgcactggccaggcccgattgtttgacccctgacatagtgtgtgactttaaacaaacgggctcatttctgtgggtaggttcacctctaccagggagggtcctgttcgaaattattcctattcttcttcattaggaaactaggttatgcctggcagwcggtccttcactctgattcccagaagagctctaaaagattttctggcaagctcctccagttgagcaggccttagggacaaagagaagagacagatgtcaccacggcctaaggcatcttggctaaagttagtttacaaagattaactgaacacctactgtgttcgtagctctgtgcgagaagaaaggcagccggacaaatgaaaaagactggcacacccagaggggcacgggcatgcggaaagcatccttgtgcctcattccatcctttctggaaagaaatccagcccatccccttccagttagagcctgcagttctttctcttccctcgagcctcaaagaacacaaggtgtgactgtttctttctagaatacccctgatgagcagttcattctcgatcgccacccaaagtatgacaacattgtcattggtgctggattctctggtgagtctgagctggggggaatggggtgccttaaagctgacctacctcagtgccaggtgaaatggtattttccacactcttagctgcccagataggtgtgaagcctggacattgtaggtataaggaggctgggcagtcagaaaaggggtattcatggtgggaggccacttctggctttgggatgtgaccaggaggacagtcagccctgtctgggtaagtaggggatgtccagagagctcaacctctgtctgtgaagctgcctgagagtctgctcttcccttcctagggcacgggttcaagctggcccctgtggtggggaagatcctgtatgaattaagcatgaaattaacaccatcttatgacttggcaccttttcgaatcagccgtttcccaagcctgggcaaagcccacctttgacctctggccagaagcctcccttctgtgcacaggagccagtttcacagatggagaagatgtctcagatgaagggagtgtccctgagatatcatccttttcttctgcctcgcctgaatcccccataaacaccagatgattgagtctaccttctttccttggcccgctccctttttcttctgcctcacttgaatcccccgtaaacaccagacgattgagtctaccttcttttcttggccacctccccattcacaactactttctcgctcccagaaggttgatcagatattctacaatcacagagtagcaaggacgtttgagatgggtatatcagtaagaagagggcacaagaactggctctggagaccaaagcagttgttaaaaattctctttgctgggggccgggtgtggtggctcacacctgtaatctcggcactttggggggctgagacaggcggatcacctgaggccaggaattcaagaccagcctggccaacatggtgaaaccctatctccactaaaaatacaaaattagctgggtgtggtggcgcatgcctgtaatcccagctacttgggagactgaggcaagagaatcacttgaacccgggaggtggaggtggcagtgagccgagattgcgccattgcactccagcctgggcaaaaagagtgagactctgtctcaaaaaaaaaacaaaacaaaaaaaacctctttgctggtatatttgaagagcttgggatggatttgactaaatctgccccgaggagggtgaacaaggtgatctcagagatcactactgctcttggagttccttctcctaaagctaaggccagcctccatcacaaatgcccataaaatctggctcgtctttgatgaacaataaatatttgttgaacaaataaataactgccctgcattaagtctgtagcgggctttcttttctgtgtgacctcatttcttccaggctctaattgtctaaattagcaccacagaatccattaacccaggaacccttggagtctttatcccctcaatgcgctgcaccccctttctctggattctttgtctcctcctcaccccctctctggttgtgtgaagatgctcagctccccagtctctcattaaggtgtattgtcaggtccttatgaagatggagctgttataccagaaagaaagagagagacacactcgcttagaaaccctgttcaatgtttgaatgttaaatgtgccattttattatcattaggattgctcccacttaatgaaacagcattagcaccgagttggctggcctccttgcactaattgctttggaagggaacaggcttataaccaccccagggtgggtggaggggtgaggggtggtaacagggactcgagcaagtctggatgcactcagatgaaacccacctggaggatctccacatcgggccagttcaaccccagaacaggagctaaaatgctctagagagaaaaactgggactgggagtggcagatgtgttagggggagtcacagagtggggaggagcaggcagtgagaatgacagtacaaatatccccaaaggaaatacaacacagaggaaatggctcttcaactgcctgagtccttaaggtcctaggcacatgtattagcactgattctccagtgagttataaaagccagccaaggccgggcgccatggctcatgcctgtcatcccaacactttgggaggctgagcggggcagatcacctgaggtcagcaggtcgagaccagcctggccaatgtggcgaaaccccatctctactaaaaatacaaaaattagtcgggcgtggtggcgggaacctgtagtcccagctactcaggaggctgaggcaggagaattacttgaacctgggaggcagaggttgcagtgagccgagattgcaccactgtactccagcctaggtgacagagcaagattcagtctcaaaaaaaaaaaaaaaaagccagccaagcctgtcaaccccatgccaagtctgctttttgtgtgatctcagatggttccctgaacctcagcctctgtaaaatgggagtattatatctgtaaatgggaataataatgccaaccagctccacaggggtgtctgaggatcaaataagatcattcattcatgcatttgttcaaaacacaaatactgagtgagcctctattatgtgtcaggcactatgtgaggcaccgtagatacatcagtgaacaaaacagataaaaatccctgttctaaaacagcatggttgttcctcaaaaaattaaaaatagaattaccatatgatccagcagttacacttctggtatatgcccaaaagaactgaaaacaggatctcaaagagttatttatacacccctgtttagagcagcattattcacgatggccaagaggtagaaacaaccgaggcatccatggatggatgaatggataaacaatatgtggtatgtacatacaatgtaatgttattcagccttagaaataaacggaattctggctgggcatggtggctcacacctgtagtcccagcactttgggaggccgagggcaggtgggtcacttgagtccaggagttggagaccagcttggccatcatggcaaaaccctgtctctactaaaaatacaaaaattaggcagggtgcagtggctcacgcctgtaatcccagcactttgggaggccgaggcaggtggatcaggaggtcaagagatcgagaccatcctagccaacatggtgaaaccctgtctctactaaaagtacaaaaattagccaggtgtggtggtgtgtgcctgtggtcccagctactcgggaggctgaggcaggagaattcttgaacccaggaggcagaggttgcagtgagccaagatcatgccactgcactccagcctggcaacagagcgagatcctatctcaaaaaaaaaaaaaaaaaaaattagccaggtgtggtggcacaagcctgtaattccagctactcgggagactgaggcataagaatcaattgaacctgggaggtggaggttgcagtgagctgagcagcagagcacgaccctgtctaaaataaataaataaaaataaataaataaataaataaataaagggaattctgatacatgccaccacatggatgaaacttgaggacattatgctaagtgaaataagccagtcacaaaaacacaagtggtattatttcacttcatacatatgaggtatctagggtagtctgagtcatagagacagaaagtaaatagtggttgccaggatctgggaggaggaagaaatggggatttgtttaatgggtacaggttttcagttctgcaggatgaaaggagttctgtagattggctgcacaacagtgcgaatgtacttaatgccacttagctgtagacttacaagtggttaagatagtcaatttcgttacgtgtttttgacgacaatttttaaaaaaatctcattcttttttttttgagacacagtctcactctgttgcccaggctggagtgcagtggtgcgatctcagctcgctgcaacctccacctcctggattcaagtgattctcctgtctcagcctcctgagtagctgggattacaggcatgtgccaccacgcctggctaattttttttttttttttttttttttttagtagagacggggtttccctatgttggccaggctggtcttgaactcctggcctcaagtgatccacctgccttggcctcccaaagtgctgggattataggcgtgagccaccgcgcctggcctaaaaaaaaatctcattcttacaaagcttacagtccagtgagaaggagacacataggcaattcacgtaagtaattataaattagaaggtgataagtgctttggggacaaaacagaggcaggtgatgaggaggtgacagggagtgctgggggagggtctgacctttcaggtgggtggtcagaggaggactcacagaggagggcctttgagcagacttgaaggagaaggagtgagccatgcaggccttcggatgcaggtgaaagaatgtgatgagttgtaaagcaaggtattgtgttatcactggtggggacagacaaatgagacacagagaagggccagaataagatcccaccagctcccaagccgagaaagttgggaagctaagatgctcagaatgccccctctcaccccacagctgcctgcagttccctctggcttctctcagtgccaccccttcccccagccagctgcagctccccttccaaaatatccagccttattcagcttgttggtgacagctaaaggatggaccagtgtctcccagaggctgagaaaggacgagtgggggctgctcccaagccctgcctcagctggcggaggcctctctagatgagcacaggaaagagtgggaggaggcaggggggtgagtgagggaggatgggtgtggggggatggatcgggccagcgaagaaaggagacagacaagaagcaggaaagaagagactggcaatgtgcagaccacgaaggcaggtcaggacctccagggatgccacgcacccctaaagccaaaagaaatgggcccagagtgcccaagtgggaggaaaccagccattcttaggtgggatggggtgggatagtagaggagatgttgggaatagtctctgggcctagaggaaagcaaaagtcattgtagaaggggtcctaggataacttgagggtttcagttatatcgaaggattttccaaagcagatcaaccagtattctctctctgcttcccttctgcctgagcgtggccaggcatcccctttcaggcaggccgtacatatcttcaggatggaagaaaatcaaaatcaatcgggcaggcaagaagagacctctggaagggcagctggggtctgcacaggctgcaggggagagataagggcaacgaagagaaagaggctggcctggttggcaagcagactgaggaaagcagaggcaggctgaaaatagattgggggcgggaggaaagaaagccaggccaggaaagaagggagagcagaggcaatcgatgccttcgtgactctgacccaatttttcatttcagcctcaccaaaagatgaggagatggtggggaaatcgggaaagactggcaaagagggaggagagtcagggcaaagtaatttgagttctaagacccaggcgatcgtggggtaccagtcagggatcgtggtggggagaggaggaggtgtatactatcctcagtaccagtttggaccccagcagagtttggcatcccagaatgggtttaacagcttaaggaatgtgagtgtacccaggaaggagggtcaactatctagaaaggtcaaaggagaaaacatggccgagtcggtctggagacagtcggctacaaagtaactccaagcctgcattttcttctcagaagagtgatgaaagagaatttggttttttaagtggtgggctgttagagcagcaagagggattaaagttagacttcaggaaatccatcccattaggtagattcatgagatactaaaacatgtagatgagcatacttatattctttccttggaaatcttaaaaaattagaagctctgctatttgggcctgtagaggctcgtctgaaggccagggcctcccctcaaaacttctggacgactgctggctagaaaggggggtctaagatttttattaccctgggggtagggtctgaaataaatatctgggcctaaggcagggctaatgcaggcacctgggttagggagaatgggggaggcccaaggtgggctggatccgtcagccctgaaggagccacagagacaaggggtgggattctaacaggcaggacctatgacatttacataactttgaataatgaataagcccagctctggggttcctagttagcactgctcatctgcatctttattcagctttataaatgattcagctcctaccccttcccccagcccctgcccagcctgcccccaagcatcggggtagttgattgctcattattttagactagatttgtttcaccaacattcagtgagacatggaatgggggtggcatgggagagaggaacaagtccaaaaggcaagtggagtgaaggggtcgggggctggagaatggaaacagcagccgtgggaagggaggctcacagctgcgagcagaggcacagagctaaggacgtgggcatcactctccaaaatgctcctggggccagcatcttcaggagagaaaagtttcttagattccccgacatgtgccgggttcaagtcccactcgaatccccgggctcccttacaactgctgccaaggcccccagcaggccccgtgctcagctccagcacagcactgaggcgttggagcagtcaagtgagtacagcccccagggaagttctcactttttcctgaggcaggaattttgctattttcacgcaaaaaaaaaaaaatctgctacgcttgtaaggcaggaacacgcaccaggtatattaggggagaaagaaataggaacagatgtacatggtatgagaatctgtagggaaagggaatgctgtatccacagggagttagcacccaccttgaaagaggaacctggagaagatgggcagccctcacctgatcggagcggctctgggagctgcctgatcagctggtcagaaacggggagaagtatttaatggcatgaacacggaagagttggccggaagctggtagggggaaaggcagagcatttctcaaccctggctgcacattataaccacctggggagctttaaaaaagatgatgcttgggacccacctaagaccatttaaattagaatcgccaagggagaaggccctaggcaccatattttttaaaaagctcttcaattttatttggatcctagtttaaacagaccaattttaaaatatatattataaaatacataaca

SEQ ID NO: 95449 - DNA, 111414 bp, Homo sapiens
catgcttcagtgggtaaatcagaggatgacatgcttttcaattcactagaagattctctgcatggcacaaacgaagtaactcttgccaacatttgcctgagtaattcactttgagttatgtattcttctaccaaatgcaaggtcctaaaacagttaggtgaaaaaagtgttgctaatgtcttagtatctagcagagtatctgcaatgacttactgcagtgctcaatgaaaatactattcctccagctatcacagatgactatatatccattcattgagttatgtgcccacaacactccaagtgttacaaatccacttaacagcctcaagtcctgggttttctgttcatatttctgaattagcataaagaaatgcaaaatcacaagcaaggagaatcctcatagatcgctgccaagaggttttgtgtttatcttggcatacataagaaatattttgagttcctgaaatgtggagcagttctttttattaggaatatgtgattaagtgagtttcacttctaatgggagactgaggcataagtatagtaagttcacgaataaaatagagcaaaagcctcattttgactggataaggcaaaaacataggtattaggtattagtataaggttcttcatttcctcctcttgtctactagctctttggattacatgagagaaaaggcagcatcagagagagaaaattgacaccttgaaaatccaccttttaaatccttctcttccactcagtcaagttccatttcactgtatgaggtctctggtagtagttcccggctttcttcatcattaactttctgcttcctctcacttgctaataacgagtaaaactgtaacaagtaaagaagctgaatttctgcatatctgagagaggacagattccatatgggttcaggccatactctgatggacaactgcaggctcaccgctagtgatccctacaggtcaggctgtgactggggtccaacagtgacaactgctatagtggaacaggatctttgcttttcatggacctgaaatccagagtacctctacatgttaggactggccccttagctgcatctcaggtcatctggctatttaagaactcccaatcctctaaagcagtgtttcttaaacccttttgatggacacttatggcaggaagtacatcttacttaacaatccatattagtcagggttcagtcaggaaaaaagaaactttaagtaggtattttaagagcaagaatttagcacagggaattgattagacagatgttcaaggactgaaaaattaaaaaaggaacactggagtaatacataggttataactgcaagaagcagctcccgcctgaagggctggagatcaaagggaggagaggaggttggggtttgtaggaaaggcctgttgaagctggggcacaggctcctgaagagggacactgtctggctgctgctgcaggtaatgctttggggaggagggagaagagatgcgatgaggctggttgagatacaataagaagctggagacaagtaaaactgccaccaggctaaaagtctgtggcaggagtgatgctgccaagcatagcaggctgtcaggaaggagcaagttgcttccctctcctccagccttgtgctcttcctctggtcctgctgtgcygccccagcctctccacccagatgacagaggagaaatgtggtttgcacaattctagccccaccaacacaaagcagaggacagagggtaggtttgaagctgaaagatgacagctcagtaactgccatacgatacttgaccctaaccatgcacataccctctggatttcattttctaccgcattctattgcattctactttaccctacactaccttaccttatcactttttaaatatgacaaagccggaagagacccatcacattgacttcatgacctactaatagactgtgacccacagtgaggaaaactctgctctagatctttacggtaagagggcctgaacgttggaattcagtgctacttacatactgaattccttccacagcaacagcgacttaaggaattacctcccaaggtactcctccactgaatatgtatgggggcccacagttataggcttcagggaaatttatatcaagaggctgcaaatgtcctgcatagtactagaagagggagagctaccagataaaggaagttttgctaaggggaaaagataaaagaactaccaatcaaaaacatttattgtgcccttattatatgtagagtattatgaaggtgtttttgagaatacccagaaatacacgttggaggagcttgaaatatagtgagaaaagacaaaaagccaatgagtaaacaatactgagcagccactcagcagtatggtcagctgtcaagggagtgagattggcaggaaatattctgagcacagagcagggtgatatractgagcaggaatgatctggaaaggtttcatgtgaaggtttgttttcagaatacgtagaccttagatagggtaaggcgctggtatcttagacgaagagaacagaagtaacagaacaagttaaggaagagtgggcctgcttgtgcagtgctggaacttgtggatcagaactagcaagagaaattggagcatcacccacggccaaggcggaagcttgcaaatggaaaaggtgtagtgactgaaccttggcaactatcctcacatttaagaagcaggtaaaagagctggtgaataacataatgaagtctggttggaaagctctgaagagatccaaggtcaaggacccaccaaggagggtagtcagcaaagtcaaatgccagagaggccaagaactctaagaactgaggaaagacctcaactgtaaaccagatgcgctgtaaatgagggtggtggctcttgaccacactgcctgtgtggattaatgtgctactactttcagctccatcttttggatttgtatagggtgtttaactatcacttgaacaggtccaaagtatctggtgaaaacaataaactatggtttactatcggtccttattcgttcctacctgtccatagccatgcgaggcattttaaggctgtgcttcagtggcttgtggtcttccctcccgcgactgcccacctccaactcacttttgtgacagcttttgtttgtgctgctgtcatccattctcaagtggcctgtcctgctgagctgattttctgggatcctggcttcacaaaacaaggagcgttatgcattgggaccttgtctttggagacttcgtcatggctgtaggctgcactacaaccttggccagctgccttgcaaagaaagacaagtgatcggtcacargggaaaccagatcagggagagatggatccggtgaacctatcatccctactacaaacatgtgttcagctggtagcagatcagtaacatcttctccaggagtaaaggagaatttatttacatgctcattacatatgcagagttgtgaccaaattgctgcaggtgacaggtccaagttcctataaggatgtcctatggcttcataccagactttgttccggacttcatctcttaagtgctgtcatttcttctgtacaagctatggttactttggtttcttttcttcctcttagacagcagattccagctattatcacatagcttcctcatttatactagagtaaaccattattatggatgtaagaaaatgggtttcataagtgaacccactgtgaaggtagccaggacaggtgtattagtccgttttcatgctgctaataaagacataaccaagacagggtaatttataaaggaaagagttttaatggactcagttccacatggctggggaggcctcacaatcatggcggaagatgaaggaagagcaaaggggcttcttacacagtggcaggcaaaagagcttgtgtaggggaactcccatttataaagccatcagatctcatgagacttattcactaccataagaacagtacgggtgaaaccgcgcccatgattcaattatccccacctggccctgcccttgacaggtgggaattattacaataaagtgagaggtgggtggggacacagccaaactatatcaacaggtcatgtacgtaagctgcttaatatttattgagcagctacactgtggactgaatcaaatagaatatgaggatacatatgtgaaaaaatattattttaatagctggctccagagttcctcttgggaagttactttgtgtaggaaaaaactttggtaaacagtttaggaatggcaggtagctatgaaggcacagattaggagatggaaataaaagtattgtataaagagaggagaggaggggagagatgggaccagaaagatggtacaatagtgggaggttacaggttatgatgaaaaaatgggggtaggtggtaggtggataaaaatatcatgggargaactgaaggacttttaagagcagggatttctaattttaggttttttgcatccttaatttaaaaccacttatctgctccaaaccttctaaagagttggctatagaaacaaccaaagaaaaggggctgatttcgaaattatgtgtcagcaggagtagagagaggagagttgtaagaggtgatatgtggagaggtctaagtgttcaggaaaagcaagaactgagagccagaagtgacggtgcaatccttgagaggacattggccgtggggaacaccacaaggtggataagggactcagtcaagttcaagaaaatctctgtggtaggatgactcagctggattacaggagccatttttgttattttcaaccataatttttcaggagatattcattactagaaaatgacaaggtcacgaattcactccccttcctctttttttctattaaatttctgggcctcagttttcccatctataaaatctagagattgggcctagaatatctctgtagtttccattagagtctatagctctaataataataacaacacatttttatgttctcttttgaggtaaatttacatgcagtgaaatgtacaaatcttaaatgtcccattccaagagttttgayaagtgcatatacttctgtaaccgaaactcttagctatagaattttttcatcactacaaaaaattctctcaaactcctccccgacagccaaccactattctgacttttatcactattgattaaataattaatatttaatagctattgttaaatgctaagctttgttttatagagcttcatcagtattaatgcgtgtatttcttacaagagttgcaagatggatatctccatttttgcagatcaaaacgttaagaggtgagaaaggcgcctctggtcatcagctaccaagcacaggggcaggacgtgaactaagaattcgttttagaagcccacgctcttaacctgtttatcctagagtccacaaacgattgccaagaaacagcataaatccaaattcagtcgaaagcaatgccatttgcaaattctaaaacctcctgaataatcctaaaggccatatgcattccatcttatcgaaggattcccttctatccccctccccagagaatggagaaagggggtgcgaaagacttcaattcggtttgactggagaaaaacacagaggtggcgtaggatccacacatcccttgggggcagacccagcggcggacgcctggacaggcggcgggaaaggcgctgcgacgccccgggtgccccctccttcgacgccactggcatcacctccgaaagcagcaggcacgaaggtgccctgccacgggggctggacgcagtggaggcaggctcatcaagcacgaccagagctcagtcggccacacgtcctcctcaatgtcactgtctccctgctctcccaccccgcgccgctgcacctccctccccccggcaacctgggcgggagtcccaagctccgccccagagcggactcacagcccccgcgctccctcccgcgctgcgcccaccgcgcggccgcggctgccatggcaacactacgccgccgccgccttttcacgcacgtcgcgagctaacggactcggcggcggcggcggcggcggcctgcgccccacccgcaccccatctggaccgcatcgctgaatgtgcccggacctgcgccttctgggtaatgaatccgagagaaaggggcgagggcgagacagcaggtggtggagggctctagccaacagcccctctcggcctcccactgccggagacgccagggcagtgggctgcggggttcctcgggcgctggctcccgtgcggggacggggaggrgcgcgggagcgccaggctcgcggtgcatcatgggaattgtagttcagcgactcctcgggctcgcggtcttggtggggtagctcggactggcgaactacaaagcccggcggccccgaccgccgggaaagaccgataaactttgagcggaccgggacagaaaaaaaaatctctctttgtcttgagggggctgttgagtggtcgcggacctgggctctgtgcgttgggaaagggaagtggaggtgagcctcgggcttcccgccctgtagctgggcccgccccagttgcagcgytcagccccaccccggctgggccaccgccctgcacagtctcagggatgagcagccgcccaagctgcagggcctcgggtcttcggcgcctctgaccctcgcaggttgctgcctttcggtgcagaaccgtatgtatgtcacacattggatgtgagacctgagaaaccgtgttttaacaggtttttctcctttcctggatacgtttatttctgggttagtcatgtttgttttaaagtagctcagaggtgtttgcatattaaacccatcaattggtaattactcaaagggcagtaatgtttaaaggttaagtgtggaaatagataaaaagatgtcattgcgattatatggtggtatctggcatttttaactttttgcatttttgaattttatttcttgaggttcaaggttgtgaaatgagtgctccaccccmccccccccttgccagcctgaacactgcctacacatattttgattagttcagytttaaattactagtaacttttaaaaacagacttttttagcagtaggcagcaataattctttgattattccagtgttattcagaatttctcagcatgttttcggaaggaaaaataccatgttttaattatttagttaattctttatatattttttatgttcaggagtacacttgagtccttagagttgactcaaagacttgctggtaaaggaagctgacacagatttacgaaaccttccttgacgaccctttaaaattttttaataggtagataaccatcctagaaatttgctgctttatggagtaagttggagaattgttgatattattgtgagtttgtgtgtgtgtgtgtttaaaaacaaaaagaccacaaatcctataaaactttctcttaattaaaatgaagttgacctgtgtaaattttacttgaggttgcaattttgtacaaggaggagatggaaagtaggtttagtaagacaggtagaaaacaaaattgaggccttatgtgatacaacataaggtttgaagtattttatttattcattcaaaatgtgttaggaacctatgtgccaggcattatgccaggtggtgagaataaagagatgaaaaaagatagtctgtatcctgcatgggcagtcttgtcatcacagtagtgtggtagagataagtgcaagttgctctaggagcccagaggaaataatcacataacagtaacatttattgaatatgtcaggtgctgtgaggagtattttgcatgcaactccttacttaatcctcaaaacagttggtgaagtagttactgatttttagagatgaggaaacaggctttagaggccttgctcaaaatcatagctggtaacgtgtgaacctgggatttcagcccaggtgggtctggtcctgatctcaagcactgaccattctctgtcatttagtagaaagatcctgactctgtctaaggaagtcaggggaggccttcagtgtgatttgacttttaacttgtgttaaaatagttgaataagctttcactggagtgatgatgaggaaagtcattctaggacaaatggatggcacaaaataagcaaaggatagattgaagaatcagtattttgtatttgggaaacgctaggtagttctgaatgactggatcccagaatacttgcaattagtgggtgaggccagatcttaaagtacttggcaccatattcagagtttagaatttttcttgatatrgggcagtcattgaagaattttagctagagtggtggtggcgtcagatttgtattttagaaagataactccagccccagtgtagagaatggacctgggaggggaaacattacaggtagtagaaaagccagttgtataatagaaaaaaacaaagtccagtagagaartgaagagagtctgaattaagcatttggagttacagaaagacatggattcaaggaatatttaagagataaaattgatatgacttgataagagtttggatgttgggagttagatttggaactcttagctgattgattcctcagtttctggctagcatgactgaggtaatagtgaatccgttgattgagatgaggaggagctggtttttattggggtgaaatataaagatattagttgagttttgagcatttgttagaggttcctatgggatattcaggtggaggtgcattttagtctggagttcagagagagcaggctggagttagaagtttgcatatagataagtaattaaagctacaagggagaatggaccagctcacattggagtaatgagtagaaaagaaaaaggaagaggtttggatatggaactctcatttaagaaatgtgtgtaggccgggcgmagtggctcgcgcctgtaatcccagcactttggaaggctgaggcgggcagatcaggagatcaagagatcgagaccatcctggccaagatggtgaaacctcgtttctcctaaaaatataaaaattagctagacatggtggcgcacacctatagtcccagctactcaggaggctgaggcaggagaatagcttgaacccaggaggcagaggttgcagtgagccaagatcatgctgctgcactccagcctggtgacagagcgagactccgtgtcaggaaaaaaaaaaaaaaaaagagttgtgtgtatgtgtttgcgggaggagcctacaaatgagaccctagttaggaggcatagaggaagaagaactgggagagagcataacaaaggaggggaaaataaggaaagaaagtaagttgtctaattttgtgtctccaacttattttctgcatgatcataggcaggtctccaaatctgtacccttatttcatatgaggtgttaatactatttatttgattttgggaagttgaaacagtttagtggaggtaaaccctaaagtgctcaacaactgaaagcatttcttctcccacttccttactaacagtgtggcaggactgccagttctgtctgatagaaaggccctgttctagactttayttgaccatattaagcaggtggatcaggtagtagttatattacaaagtgatgattagagtctgaggactaatcaattttttaaaatgaagcttccgttaatgctataaaatgttattgtatagggcattaataccaatgtacttttgccttgttttcatcttcaaagaaacaggaagttccactagataatatgagagctcaatggctctaaaattcttcaattctgacagtatttaatgtctggactgatttgtgatttcactgatatttgagcatctgtaaatgaaaatatgtttatattttaatgtgctcaagagtatttcattttatttttattttttggagacagggtctgactctgtcacctaggctggaatgcaatggtgcagtcatagctcacagcagccttgaactcctgggctcaagcagccttcctgtctcagcctccccagtggctgggatttcaggcatgtggccacacccggctcaacattattttaaacatttttctcttcagtgataactatacttatatatggtagtcccagggaaattgtgccctagaatacctgataaaagtgagatatgggcatttgccagataaattcaaggcatagattgtgagagtagtttaaaaaaaatggagtagtttttcaaggtggtttaatcttcactggatgtcttyagatatgtttcttttgctggggtatggtttgattgtggtcctaactgaacggatggcaaaggagtaaatgaccttttaagtccttttgtaactttgttctgtccattagtaattgtaaaagctcctattaggcagcctattaaaaagtgagctttggtttgaaatcttattctttttaatattttgctatgaagctgtttttagtgagcactttttatagtttttaatcatatctcagtattgttttgcattttgtaaagaatttaatgcttagttgctgatcccccaattgtatttacttcccagggtattatagaactctttagaatggttattttgtggacatttatcaaacacatgtgccttgcatttgagttcaagaaacattattgtgtgtctttatgtcaaacagtgcaccaaatgatacatgatacatgaataagatctggcccctctctcaaaggatgttacatttcagtcagtgctcaaactagttttggtatactcactcttgtgttttttaaggaaatcatctccaaaaaacaatgtattttatttcttattttcttagcttttacgtgtttgagggacaaacaatataacttcatttgctgtatttcaataagttgttcctttattctcgtttattcctgtctctgtgagtgtctttatatgtcagtattcttttctttctgatgttttactctttccatttttcctggtgatttggcagtaggaagagaaatgaatgagagaatcagtagtgactgttttttttttctgacctacttctgtgagagtatggatgactggtatttaacacataattcctgatatttttatacttgtattttctctgcattattagatattatttgaagtcaagaattttatgttagtgaactccacgtggccttacattgtttcttatatgtatataggttatttgcttaatgtggtaggtgcttactaattagtttagattgaatgatgaatggatgagtaagtaaatatgattataaaattacttgttcaaagactacttgagtctgggtgtggtggctcttgcttgttatcccagcactttgggaggctgagaggggcagaaagcttgagtccaggagtttgagacaagttgcctgggcaacatggcgagacatcatctctgcaaaaaatacaaaaattagccaggcgtggctgcgcacacccgtggtcccagctactcaggaggctgaggtgggaggattggttgagactgggaggtccaggttgcagtgagctgagattgcaccattgcactccaggctgggcgacagagtgagaccttgcctcaaaaataaataaatacatacatacatacttcataaaatacagtaatatgaagcagatggttttgaaaggttttaggctgttcaaagcactatgaaattaaaaaacaagtagtatttaattatataggcaaccacaacaaaatatctttatttctgttaataagccttttatatttatttttagattagctgcgtaactttaaaggaatttgaggcagtaaattgtaatgagccaggaggacaggctctgagttagacacatctgggttcaaatccaggctctatgggcaaattatttaaattctttaaagcctcagtcacctcctctgctaaatggtgggtaactgttactgttttgtagtgttataaggattagatgagataatgcctagaaaaacatttttatcgtattacttggtggggagttagcattcaataaacatcgctactattatttttgtgctaaaaagggtatttatgcaattagataaagtttatagggttttttttgtttgtttttttcagacagagtctcactcttgtcgcccaggttggagtgcagtggcgccatctcggctcactgcaacctccgtctcctgggttcaagcttctgccgcctcagcctcctgagtagctgggaccacaggcactcgctaccacgccccgctaatttttgtacttttttagtagagacggggttttgccatgttggccaggctggtcttgaactcctgacctcaggagatccgcctgtctaggcctcccaaagtgctgggattacaggcgtgagccaccatgcctggccaagtttatagtttaagctgtcatcttgagacacagtaacagatgatccacattttctgtcctttgtaatattttaaagctgccagtagaatttagaacatgagcagaaattactgtgatggttacttttgagaaacgtttaagctcttagaaccctatattagtatctagattcttttatgtttatgaacagtttttttttgtttctaaaatatttgagaagtgatttgtatacatgtaaaaaataaatgaaaagccttaattactacatacattcttctgtaatgtctgggtttgtggttgttttctttattattcatggcaaactgtagtccttgagactattacccaaaataaagagatgggaggtattgtggttttcaaaattaactatttggttgattagtactcacatagtaggttcatttattgtgcttgaaacatacttcaggatgcattaatttgagaagtcatggttatgtgtttccttaattgcttttatttatagcagccattgtatgacataaactggacttcggtgatttggagaaacttttttttttttcattaagcatgtaaagcctgsacatattgataaaattcattgtggtacaaaatattgaaaataaaacttgatttgttgttttgcttaccactgttctaattagtgttatttagttcacattgctatagttcaggttacttaggtgtttctgaaataggcatctactttcaggaatttacaacttttaggaggaaaaggaacaataggagaaaaatatggaagtgtcagaataaaaatagtttaaagcagaaattattttcttagcctcatatgtattgtaagtataactgaattagattgacatcattcacataaaattagtttaaaaaatgttttgtttcctcttcaaaaaccattactgtggagacaaaagaatgataaatattatgatttcatttgtaaaaggaattatgagtgacatccctggtgggattgggttctggatacaagctagcttttcattttttcaattatatgtcttagtcttggcatgagataaaaaattcaagtatgttgggagagaatgtgtgtgtgtgtgtgttgtgggtgatggtagatttaaaggagagaacagaaaggttggagatgtagctgaaaagatggctttatgtgttacatttagatctgagtcatgaaacagttacaaaaataattatctggaaccagataaagcagtattccttcttgatctgagcatgaacttggactgagctcttctcagtctgagcctagaactctccttgaaggtattatctggagcattctgtatagggcaactttgctgggtcagttcagcagtaaatactgtaagaagatgcttaatttatttttgaatacataatctcaaaataagagacattgtcaaatattagacattgctaaaatattttgtctttagatttaacctgacattttaaaaagacctagaaattcttctaatttatattaaaggagatttaaaaaactatgtttcaagattatgactaaaaataattttagtatagcttctagaaatttataatgaaaattgaatcagttgatttctttttttcagaggaaaaattaactgcttcagttatctgcattgatgttgagtgtagagtaaaaatattccttatattgattcagtgttgtatgtgaggaatgatgttaacatatgatcacatttaatttttaaaataaccttatgataaatattatttttcctattttgtagacagaattgaggcttattgaaattatatgatttgcctgaggtcacaactaaaaatttatggtgcctggattcatatccaggcttttctgtctgaaatttttatgtggcctttatcaaacataaacttgaatggtttggtatacaattctaggttgccaaccccctacacccttaccccttggaagatattatttcattgtctccaggctcccactgttcctcttgaaaagttagctgtcaatataatttctttcctttgtatataatttgtcatttctttctgttttaaatgttcttcagtcttactaccttgtctctaggtgtgaactttgatttgctttgaaactgaaaattattgtcttctgttagttttggaaaattctcagccactgtatttttgaattttgcctttcttttttctcctggaattcataatagacatacatgatggatcttctctttctactctgttgcatttcttaatcttatttacttattctctatatgctgcattctggtcagtttctgcagctctgtcttctggtttattgattctccttttatctgtgtctaatctcttgcttcctcagtccactgagttttgtttttatttcagtgactatatattttaatgccagaagttctttttgattatttttcaaataagcttatttattttaaaatttcttgtccctatgtctttaaatgtacttattttacagtagctaaaaaggccttaattttgctttatgttgtattaattctccctcatagtggattgctttctttgtatcttgtaattttagatgtaaactcagtggaaataaagtaaagcctgggtaaatgatatgtcctgtacttttgtgatttgtttctgtgaagtgcgctatggagaactgatgagtgaataaacaaattttagtatgtctatataatgggatactactcagcaataaaaagtaattactgatacatataagggcatagttgaatctcaaaagcattattctaaatgaaggaaatcagagtatataccatatgagtttatttattttgcattctagaactgacaaaactgcaggcatacttgagagatactgtgggctttgtttcagaccattttggtaaagcaaatattgygataaagctagtcacacaaattttctggtttcccagtgcatataaaagttacgtttacactatactatagtttattaagtgtgcaataacattacgtctaaaaaatgtacatgtctcaatttaaaaatactttaaaawtttttaacttttattttagatttagggggtacatctgcacgtttgttacatgggtatattgcatgatgctgaggtttgggatatgaatgatcccgtcacccagagagtgagtgtagtagccaaaagatagttttccaactcttgcctgcctccctcccacctctattagtttccagtgtctgttgttgccatctttatgtctaggagtatccaatgtttagctcccacttatatgtaagaatatgtagtacttggttttctgttcctgcatttatttgttaaggataatggcctccagctacatccatgttgctgcaaagggcatgattttgttcttttttaagaccatatagtattccatggtatatatgtaccacgttttctttatccaatccactgttgatggataccgagattgattccatggctttgctattgtgaatagtgctgcagtgaagatacgagtgcatgtgtctttttggtagaatgattggttttcttttgggtatatacccagtaatgggactgctgggtcaaatggtagttccgttttaagttctttgagaaatctctaaactgctttccataccaacaatgtataagtattcccttttcgctgcagccttgccagcatctgttgttaaaaaagactgtattgctaaaaaatgctaacaattatctgagcctcagcaagtcttaatctttttattggtggggggatcttatcttgatggctgctgacagatcagggtagtggttgctgaaggttggggtggctgtggcaatttcttcttcctccttcttctcttttycctctcttcctactcctcctcatccttcttccttcctcctccttcttttcttttttctttttttttttttttagaggcagggtctcactctgtcacccaggctggagggctggagcgtagtggtgygatcataacttactgcagcctcaaactctcagactcaagcgatcatcccrccccagcctcttgagtagctaggaccacatgtgactaattttttttttcttgtccctaatactttattggtcacctctaggcctgtgtgctgctgggcgggctcgggagtgggcgtcactattcagctcccaggaggaggcatgagaaggccttggcctagccctccagggtcccagactgtggtgtttggaggggcaggtctggcctttcctgggtcagcacagggcacctaggtaggggcacaggtgagcacccagcacaggcacctaggtaggggcacaagctcactatccattggccagcctaattttgtttggagaaatattcctcgccgtcatccacgttgagcttaattgtgtcactgccaagcttccagccagcaggacaaacttccctgtgctcgtccgtgtactggatggtctggaccagctgcagagcctcatccaatgagcgtcccacaggcaaatcattaacagtgatctggcaaaggacacccttgccatcaatgataaagaggccccagtaggcaatgcactcatctgttttcagctcaccgtaatcctcagattgccacattagcaagcagggggatgttcagggggcccaagcctccctccttccgggggatgttaatccaagccaggtgggtgaactgagagtccaccaagatgcccagcacttcgcagcccagcttgcggaagtcctcggcatggctgctgactgcagtgatctccgtggggcacacaaaagtgaagtccagagggtagaaaaagaggaccacgtacttccctttgtagtctgacagcttcacctctttgaaggcgccatccaccatggatgtggccttgaagttaggggcaggctttcccatgcacgcattacctgaggccatgactgaacaagctgtgtgggcaaaggctagatgcacggacgatcacgtgcgtggacccgcgttctcagtgcccatgtgactaattaaaatttttttttttttttttttagaattggcatcttgctatgttgcccaggctggtcttgaacttctagcctcaagtgatactcctgccttggcctcccaaagtgttgggattactggcatgacccaatgtgcctggcccagggcaattcttaaaataacaacaaagtttggtggacgtattgactcttccttttgtgaaaaatttctccatagcatgcaattatactgtttgatagcattttacccacagtagcaattctttcacaattggagtcaatcctctccaaaccctgctgctgctttatcaactaggattatgtagtaatctaaatcctttattgttatttcaacagtgttcacaagcatcttcaccaggagtagattgcagctcaagaagccactttctttgctcatgcataagaaacaactcatccattcaagttttttttttaattttttgtagagatggggtcttgctgtgttgcccaggctggtcttgaactcctggtcttaagtgatccttttgccttggcctcccgaaatgttgagattacgggtgtgagccactgtgccctaccccgtttatgttttgtcatgagattgcagcaattcagtcacatctacaagctccacttctaatgctagttctcttgctttttctaccacatctgcagtgayttcctccaataaagtcttgaaaccctcagagtcatccatgaggactggaatcaatttctgtaacactcctgttagtgttaatgttttgacatcctcccttgaatcacaaatgttcttactggcatctagaagggtgactctgttccagaaagtgttcaatttactttgcccagtttcatcaaaggaaatcactatctatggcacctatagccttaaaaaatgtatttcttaaataataagatttgaaagttgaaataactcctttatccatggcctgcagaatggataagcaggcatgaaaacagcatttatctctttgtacatctacatcagagctctttggtgaccaggtgcattgtcagtgagtggcaatatttttaaaggaatctttttttctgagccatagctctcaaagttgggcttaaaatattcagtaagccatactgtaaacagatgtgctgtcatctagactttgctattccatttacagagcacaggcagagtagcttcagcataactcttaagggccctaggatcttcatattagtaaatgagcattggcttcaacttcaagtcgtcagctaaatcagcccctgacacgagagccagcctgtcctttaaggctttgaacccaggcattcacttttcctctctagccaggaaagtcttagatgaaatatttttccaatagaaggctattttgtctacattgaaaatctgttgtttagtgtagccaccttcatcaatgatcttagctagttctagacaacttgctgcagcttctacattagcacttgctgcttcaccttgcacttttgtgttatggaaaaggcttctttccttaaacctcataaaccagtctctacttgcttcatacttctgcagcatcctcacctctttcagccttcatagaattgaagacaattagggtcttgttctggattaggctttggcttaagggaatattgtggctggtttaatcttctgtccagaccactcacactttctccatatcagcaataaggctgttttgctttctcatcattcatatgttcactggagtagcacttttaatttctttcaagaacttcttctttgcrtttacaacttggctctttggcacgagagatctacctcttgccctatcttagctttcaacatgccttgcttgctaagcttagtcatttctggcccttgatttcaagtgagagacatgcaactattccctttcacttgaacacttagaggctattgtagggttcttcattggcctaatttcagtattgtgtctccgggaaaaggaggcccgaggagaagagagagagagggcaacagcctattggtagggcagtcagaacacagtatttatcaattatattcaccttgctatrgggcatggtttgtggtgccccaatacaattacaacagtaacatcactgatcactattaacagatataataaaaatggagaagtttggaatattgtgagaattaccaaaatgtgacatagagacacaaagtgagcacatgctgttagaaaaatggcaccggtagacttgctggatgcacagttgccatgaatcttcaaattgtaaaaaatggtgtctgcgaagtgcagtaaaatgaggcgcggtaaactgaggtgggcctgtgtagggagaagggaacaggagagtgcatggtgagagttggaggtcaaatacaaagtggcaaaagggagttttctggggtgatggaaatgttctttacctttgttgtggtggtagtggtggttatgcagtttataaagttttcaaaactcatcaactgtacacttaaaattagtggawttaattgtatgaaaattatacctcaataaagctgatttttaaaaagcaggcagaattcatctgtggtatcagaatagtgattaaagtactgactgggagggatgaaggatccttctggggagttggaagtgttctgtattttgaaggggtgttgccggggtgtacacagtgtatgtgcacagtgtaaaaggtcattgagctgcacacttaagacttgtgcactttaagttatatacctcaataaaaaaggaaaaagttctaaagaaggattataatataaagttgagaacatctccaagaaagtagagcaaaaggacagagaggtggaaaaaaggagggaaaaactaagaaaattagaggaccagctgaggaagtctaattcctggataaaaggcatttcacagcagaaaaaaaatggaaagaaatttttaatgaaattcaggaaagaaattttaataattcagaatatttcctaaaatggaaagacattaatttctacattgaaagaaccccagatagacccatttcaaagcatatcatcaaaaattttagaaaactcatgtcaaagagaagtttccagaaaaggggaaaaacaagtgatatataacgaattaggaatttaaatgacttcagtcttcttaacctaatattgaaacctaaaatgtattagggaaatgccataaaaattctcaaggaaaattatttccaaactaagattcagtagccaggcaaattctcatggaagtatgagggtagaataaaggtatttacagacatgcacagttgcaaaaattttttctcccaactgtagaaaatgtgctccataaaggtaagagagtgaaaaaagaaagagaaagacatgtgatacataaaaaaaggacagcatagaggaggcagaagggctccccaggatgaagggaggtaccaagttgaacagccttggagggtagaaagagatagtgtctttctccagagcaaaggtcaggtttgcttacagccttggaagatacagtatctccctttggaacaaggggtagggaagcataaaacttaatagattcaggttctctaagcttaggcctcctctcctgtaatgcagactacttcctttgcaggtgttacatggcccttttcaaattgccccatgggaattggggcttggggaactgatggaaaaaaaaaaaataccttgggttaggttgtcttctggaagctttatagttttaactcttacatttaggtcagtaatccatttgagttaatttttgtatgtgatgtgaagtaagggttgagattcagtttttgttttgcatatggatagccactttgtttcaggacccttttgctggaaaaaattgtccttccctcattgaattgctctggcactttggttgaaaattagttggctttgtatgtatgaatctgtttcttgactctctagtttctttcactgatctttgtgtctgcctttatgtcagttccacactgtcttgattaccgtaactttatttttttttgagatggagtttcgctcttgttgccttggctggagtgcagtggcgcgatctcggctcactgcaacctcctccttccaggtcaaagcagttctcctgcctcagcctcccgagtagctggsattacaggcatgccccaccgcacccggctagttttatatttttagtagagacgaggtttcttcatgttggtcaggctggtcttgaactctcaaccttaggtgatccactctcctcggcttcccaaagtgctgggattacaggcatgagtcaccgtgcccggccatgattactgtaactttatagtaaattttaaaatcatgtagtagacatccacccccaacaggcatttttcccctcaaccccttagaagtaccccacctgaatacatctgtgttagtaagtcctactttattgtttttcagaacttttgtctattttgtgttctttcatttccatgtaagttttagaatcagcttgtcaatttttcctaaaaaggctgctgggattttgattgggattccattgactctatgggtcactttcaagataatttgacatcttacgcatattgagtgtttttattcataaacacatacacacatatctattaatttaggtcatctttaattctcttagattttaatagttctcaggttacagatcttgcacatattttgttaaatttatccctgaatatttaatattttttggatgattttactctttttagtttccagttatttcttgtatgtggaaataagattgatttttgtacactgacctcttatgctgcaaccttacacaactygtttattagttctggagctatttgcagattccctaggattttctccactgacaatcatgttttctgtaaataaaagcagctttacttcttttccaatctgcatgccttttatttttgtatcgccttattgcactggttagaacctcagttctaatgtggaatagaaggggtgagagcaaatatccttgtcttgttcttgatcttggagagcatttagtctttcacaatacatatgctagccgtaggtatttcatagatgtccattactcggttgagtaaattgccttttattcttagtttgctaagcattcttatgaattatgttgaattttgtcaaatacattttctgtatctattgagatgatttataatgtttcatttttattctcttaaaattgtattgattggttttaaaataaaccatcttgaattcttggggaaaacgtcactgggtcataatacattatctatttcgtcactgggtcataatacattatctattttacatattgctggatttgattagctaaaatttaaagattttttgtatctatgtttttaagggatattgatattgtaattttctgataagatctttgtctgattttggtgtaaggctaacactggctttaaaatatgagttggatagccaaaagaactatggcaaaaaaaggaaaaaaaaagagttggaaatatttctacctcttctgtattcaatttcattaattgataaaggagtattccgattaactactctgtctcttcttgggcaagctttggtgtgtgaccatcatagaatttgtccatttcattaaactctcttttgtctttcagtagctccaaggtttgtagtgatagccctccttcattttttgttttggtaatgtgtatttttttttttctctctttcctggtcaatcctactagaggtttattcattttattgatatttgtgaagaacctgcttttggctacattgaaattttctcttgtttttctgttttctatttcattgatttcttccctcaactttattacattgttccttctgcttcttttggttttaatttgcttcccttgctagattcttaagatagaagctgaaagcaagagtcggcaaactgcagtccaggggccaaatccagcttgccacttgttcttgaatggctcatgaatcaggaatgatttttgcatttttataaggttgaagaaaaatcaaaagaagaatactattttgtgacatgtggaaattaaatgaaattcagatttcattgtcyacatataaggttttattggaacacaaccacacttagttgtttacaaattgtctctggctgcttttgtgctggaatggcaaagttgaggggttgtgacagaaaccatgtggcattctcattgcttttgcactgctgtttctgaactgtaatcactgttttaagtgccatgcatatcactgtgctgtgacattttactttattatcaatgcatacacatcatgtcaaaacaagaaaagatgaaaaaaatagacttggaatgttatacttttaaagcatgctgaagcatggattattgagttatgacaaggcattgtattatgcagtgatactatagctgtgttaaatacaatatacactgatattaccagactctgcattcatcacaatattcccaactcacaggaaagtaatggtcagaaaaatgagaaaacataaaaaggaatatcttattccagtagaatttctttacaaaattagaaaataaaaatcaggctgcacccagagtaaacttccaagtggctcatttgttaaccaagcaaggaagtcatttatcaatagtgaagtaactaaattgtgttggttacaacaggcgcagaattgtgtctggagaaggtaaacttaagactgttagtcttttggcaagaagagttgctcaaagaattgaggacatcaataatcaattaaaaaggcaaattattttgagtggttttccttggcttttgatgagttgacagatgttaccaatactgctcagttgtttatttgaaaagtcaaggctgagtttgaagtgttaaataatcttaatgaatagtgtgtgtagaatagctaaagataagaatatttcaaaaagttragaaaacactaatggcatgcaacctgaatgaagtgtagtctgctaagatgtgttataactgatggtagtaaaaatttgtatagaatagaaaagaattcaggtggacaaataaagctgtgaaagtgtaagaagtttgaagtctacagttacttattttatttcttagcaggtattttgcagagaatgtttgaatctatcatgtaatcttgaaccagtagtgtcaacatttgctcttgtggacttaaccattgtcagttctaggaatttttgtcagaaatagaagctgaatattctcacttgccctgctgtacagcaatttgatggtttaatagttgtaaggctttattgcaaacttttgaatttagaagtgagattgaaatttttctgaatgtgagaaactgctgtcaatctgaatattgaacgctgaatggctttagaaatcaatttgtgatgcagactcaatagtatttcttaatgaattcaacctaaaattacaagacaaaacagttgttatatcaaaactaatactgcagtaaagttatttcaatggcaaccactattctttgaatcacaagtaatatcaagtaattttatatagctttccatgctgttataagttaaagcaaagaagtaaggtctccattcctacccagtttgcaataggtatgttttctgagttcaaactacagtttcagcagcattttttagaactcgatgtaagtgccaaggaaatttccatttaactgtgcagttgaggcacttcttatttaacctttaattggaatgattaatctgcaaataatggcacgtaaatactaagagtaaatcctttagatgccttccaaacaatgattatgctgaattgaaatcatatgcttgtgactactatcagtataaagtagcacctaacctactttgaaaagtagacattttcaaacatgaaatgtattgtattcaaggtaaacattagaatgtatgaacatttgtgattgattttgatgatagggaatactaactttgaatcccaactaagtgaaatattgtccctaaaaagagtttcattcttctccttagtcaacctgtcttacagaaagttgtactctgttattgtttctataatattttgaattgcatcgataagaattatggaattttttgtctcattatataagtagttatataatatccttcattttgtttgttagctgtcaaagcctaaaatatttacttgttaggtcttttacaggaaaagtttggcaacccctgatttgtatcaggatatttttatcttttatagttttgtgtctgtatttgtaagtaggatttatgcttttgtttcacaatgactttaaagggaaataatttatagagcatctttgtttctactggatttattaattacatattattcattataataaggccatattgtttcgtgttaatgttctaaatttgaagatgacactttgtgtggttgtcctgtattctgtggatagatccactggacattgaaatttgttactgtgtaaaagtagttgtattagtccattctcatgctgctatgaagaaatacctgagactgggtaatttataaagaaaagaggtttaagtgactcacagttctgcatggttggggaggccgcaggaaacttacaatcatggcggaaggcacctcttcacagggctgcaggagagagaatgaatgccagcaggggaaatggcagatgcttataaacccatcagatctcatgagactcacacattatcatgagaacagcatgggggaaccacccccatgatccagtcacctccatgtgctcctgcccttgacatgtgattattacaattcaaggtgagatttgggtgggaacacagagccaaaccatatcatcctgcctgtggcccttcccaaatcttatgtcctcacattgcaaatcattcctttccaaccgtcccccaaagtcttaacccattccagactcaaaagtccaaatccaaagtctcatctgagacaaggcaagttccttccacctatgagcctgcttcaaaagcaagttagttactttctagatataaggggagtataagcattgggtaaatatacctgttccaartgggagaaattggctaaaacaaagggatataggccatgcagttctgaaatccaatmgggcagtcattaaaccttaaacttccaaaattatctcctttgactccacgtctgacatccaggtcacactgatgtcagaggtaggttcccatggccttgggcagctccacccctgtggctttgcagggtacatccccaccttctggctgctttcacagctgaccttgagtgtctgtggcttttccagatgcataatgcaagctgtcagtggatctaccattccgggatctgtaggatggtggccctcttcttacagctccactaggcagtgccctagtggggactcagtggaagttccagccacacatttcccttccacacttccctagcagaggttctccatgagggtcctgcccctgcagcagacttctgcctggacctccaggcatttccatacatcctctgaaatctaggtggaggttcccaaacctcagttctcatcctgtgcacttgcaggcccagcaccatgtggaagctgccaaaacttggggcttgtaccctctgaagccatggcctgagttgtaccttggccccttttagccatggctggagtggctgggtgcagagcaccaagtcccgaggctgcacacagcagaggggccctggacccagcccaggaaacccatttttccctcttaggcctctgggcttgtgatgggaggggttgccgacatctctgacatgccctggaggcatttkccccattgtcttggtgattagcttytgattccttgttacttatgcaaatttctgcagctggcttgaatttctccccagaaaatgggtttttcttttctattgcattgtcaggctacacattttctaaacctstattcactgcttcccttttaaacataaattccaattccaaaccatatctttgtgaatgcttaaaactgtatgcttttaagagcaatccccccttccaaatcacctcttgaacactttgctgcttagaaatttattctgccagataccataaacacctctctcaagttcaaagttccacaaatctctagggcagggacaaaatgctgccagtctctttgccaaagcacagcaaggacaagttcttcttcatctgcaaccacctcagcttgaacttcattgtccatatcactatcatcattttggtcaaaaccattcagcaagtctctaggaagttccagagtttcccacatttttctgtgttcttctgagccctccaaactgttccaacctctgcctgctacccagttccaaagtcacttccacattttcaggtatccttgtagcagcacaccactcctggtactagtctactgtattagtcctttctcacactgctgtgaagaaaaacttgagactgggtaatttataaagaaaagaggtttaattgactcccagttctgcatggctggggaggctcagaaaacttagaatcatgggggaaggcacctcttcacagggcagcaggagagagaatgcatgccagcagggggaataccagatgcttataaaaccatcagatctcatgagacttactcattatcacaagaacagcatggaggaaactgtccccttgatccgttaccaccacgtggtcctgcccttgacacgtggtgattattacaatttaaggtgagatttgggtggggacacagagccaacccgtattagtagtgtactatttgttgcagtgtgattctcaagtaatacaactctgccttcatggaaccttataagaggaaaataacatgccaaacacataaacatttgtttttaaaaatgtgttggagtcctttgaaatgcctagaactagtgatggttaattttcaggaagaatttttgagtccctgaagaacagataagagattgagagtcagagtagaagagtcaggctccccaaaccaaagtttaattccctgaagaaggcatagagtagtattttgattttcttctttatgtgtattcattggtttactgttcctggaaatcagaaggcaattttgacactttctcaggatatcattctcctgtaactctggacttgctattctttttagtcttgggaggaaagtatctttgcatagaagccttggatgattctaggagacttttggaaagcctggaagaaaagccagaattactggactggagagctttggtggaagccagaaatctagagggtattctaactaacatcttatagaaaggaaaataacaatagttatttgcatggccaaaaagatatagagaatgatggggtcttagaagattacaaattggggttcagagastgtaatttataggtgtttgcttagatttaagtttgaggcaattacatgagtataaatggtacatggacaactatagactgttctttaaaatgtattctttaagtataactttttattcttggggccaagaagttttagtgataactagtttttatagtttcaactgacttcagtagaaaatatattcatatatttatgtgatattcatattttttatattgtcaagaataaattgaataaaaaaaaatttcatctgttattgcagcctatggtaattataaaggaataaggaaaactagtgtccggttttatgtacctgtaagtaaatcagtagttcagagctgtgtaacctttctccctattatttccgtgggtgttcttttgtaatctcctttgtacttccaaatttgaaaacgttgtttagtgttgtaagatgcattcagataacctcaaagaatggtaactattttgactttcaaagtagttctagactgggcgcagtggctcacgcctgtaatcccagcactttgggaggcttaggtgggtggatcacctaaggacaggagttcaagaccagcctggccaacacagtgaaacccatctctactaaaaatacaaaaattagccgggcatggtggtgcacccctatagtyrcagctactcaggaatcacttgaacctgggaggtggaggttgcagtgagtcaagatcatgcygctgcactccaatctgggcaataaagtgagtctctgtttcaaaaaaaaaaaaaaaagtagttttaaacatattttaaagaataataaatgttttaaagtcagtgctgaaaatttttaaaaagtcattatattttatgtttaggtctctgaaagaagatgaatttggctgagatttgtgataatgcaaagaaaggaagagaatatgcccttcttggaaattacgactcatcaatggtatattaccagggggtgatgcagcagattcagagacattgccagtcagtcagagatccagctatcaaaggcaaatggcaacaggtaagatggtattaaagtattagatgagttaggatggcagtaccctattatacttgagagattagagttggaaaatctaattttgagtttgagatggaaatagtgcctatttatctcaatactgaaatacatttaaaatatactcttgaataattttctagtatcttacctggttaatgttttttgatcatatatttcgtgagggatgttttgaaaatatttaattccaattgaatctactttaacttttttctcttttcatgatcagttacctaattgtgtgactgcaaacttttgaaataaagtatttcattcattcattcttttttttttttttttttttttttttgagacagagtcttgttctgtcgcccaggccggagtgcagtggcgcaatctcrgctcactgcaacctctgcctcccaggttcaagcagttctcctcctcagcctccggagtagctgggactacaggcatgtgccaccacgcccagttaatttttgtgtttttagtagaaacagggtttcaccatgttggccaggctggtcttgaattcctgacctagtgatccacccacctcagcctcccaaagtgctgggattacaagcgtgagccgctgtacctggcccattttttcttttttttttttctttttttttttgagacggagtcttactctgtttcccaggctggagtgcagtggcgcgatctcggctcactgtaagctccacctcccgggttcacgccattctcctgcctcagcctcccgagtagctgggactacatgcgcccaccaccacgcctggctaattttttctattttttagtagagatggggtttcaccgtgttagccaggatggtctcgatctcctgacctcgtgatccgcctgcctcggcctcccaaagtgctgggattacaagcatgagccaccacgccaggcctctttctttctttctttcttttttttttttttaaagagacagggttttgctctgtcacccaggctagagtgcagtggtgccatcacagctcactgcagcctcaaactcctgggctcaagcgatcttcccatctcagcttcccaagtagctagggggacaggttcacaccaccatgtccagcaaatttttaaattttttgtaaggactgagtcttgctatgttgcccagggtggtctcaaactcctggcttccagtgatcctcctgccttggcctctcaaagcactggtattacatgtgtgagccactgtgctggacctgaaataaagtattcatacttgcccttttccctttcatatttacatgttgttttgacccattttgcaaaactcttttgaaagactccttaaaaatacaaatgagtcagtaatctaataaaaaacattactatatttgctgtcttttgactatataatttgattatttaataagacagttaaaaacttgaattttaatttgcctacttaccgttttttamatttaatgttttaattgatcagtaccttttagcatagttcttgctttgctgttctaattccaaattaattgtaacttttaaaaaagaatttttttttttttwacaaataatacttataagcaatatatctttaaggaaataaaagcatcttcaatgatgtttaaacaaaattggcttttgttttataaggacttattatttaagctcgtgtttttcacctgttatactaaaacaacgtaacatcctttttagaaaacgttaagtaaaaaaaatacagaacactccaggagtttgtgtgcatctcgtgcagggaacatgctggtcttctctgtgttattccaattttagtgtatgtgctgccaatgcagacactccccacttagtgttaaaatttaaaatcttctaaaaattaaaagtacaaagtcaagtgtttctttgaagtttccattttatgtactaatgcctttcaagtgtttcttctaatttttccattagtcagaaattgatgttttcctaagttttgagggtaaatttgacttattttccaacttaaatgttaccaagttatattgattgagaacaatatacttgctccaactcaggctcaaatttttagttgttttcttctatccttcctattagccacaggcagggtattttattaatctattatggaaatgttttttatatattctgaattgtgtgtgttaaatagtgaccatttctactcagacatttctactatgtttctttccactgggttctgaaattacatttcttccactatagcatattctgtaattgcatgtattagctgttgaattttacctagctttttctttggatctgtaactccttcatatgttccttttaatatatcattcaatataaagatgagggaaaatttcttatactctgctttacagtgtgacgtgctttctggttaaaaaaaaaagaattgttaaaatgaatttataattgtaattttcttttcttttctttttttttttttttgacatggattcttgctctgttgcccaggctggagtgcaggagcgtgattgtagcctcgaactcctgggctcaagtgatccttctgcctcagcctcctgagtagctaggactatagactcgcactaggactacagactcatgctgtcatgcctggactaatttttttgtttccccaggctggtcttgaatgtaatttttaatctttatctgtttgctttggaaaattagtttgggctcaaagtttgmaaacacaagaatttcctcatagtatgtgttcagttaaattttttaaatacaggaaaaatcttgtctttgaaatcaaaataaactttactcagaactcaaaataatttaaataaggcaaaaataattcagatttcaggtgaaggagaatttaaataaaaactggaagtttgtaattcatagtataatactgcttctagctttcagacactcatgacaggcgttttatatttagtgatattgggaataggaaatgctgttgaaaattttggcttaatttttgggaatctatttataaatatattaaaagtatttagcacaatattttagatttcttggaatgtttaacttgttacctacttagttgcttgttttaaattgtattaatgatcatcacgttctttggtagaaatggaattccgttatgaaagatatataactacttattaaaaggtatagaattatgattttttcaaactaatttctacccttttctcagtattacttgaaatagttctttgtatttatgaatgttttaatgattcatttttcacmctttgacattaagaaaacgtgcactctatagtaatttattatttacaatttatgaagtatttaaacagcttctagcataaagcctattttttttttttaaggttcggcaggaattattggaggaatatgaacaagttaaaagtattgtcagcactttagaaagttttaaaattgacaagcctccagatttccctgtgtcctgtcaagatgaaccatttagagatcctgctgtttggccaccccctgttcctgcagaacacaggtaaataggactttatattctctttaggtgcttctagttaattgatgttcacagtgaagcatgttttgaacaaagtatgaaaaattatttttggggacatgtaatttcagtrtctgtttttaatattcacatttatacatttacagttttgtatttgataaagtacagaagtaaatgacttgttacatatcttgcttttagaatgctttattacgctaataacaatagatgcctattgctagtcctaaaatttatyagttaagagaggtcttttgggtttcgtaatggcagcatcaaaacttggatagttttgcttttttgcttgaggagactctaacaacttcaaatgaagtagtggagaaattgaattttcctagttgggcctacagtcaatttccagagttttagtgtagaaggaaccttaccgataatgtttaagaggcttattacttaaaggttacattcctcagtgtggcatctcccaccagttttctctaatacccagcctgtgcatcatttacgttaaacctctctctttttgcctttttttggtcatcttgtctgtgcagtctcttctttcttcaaggaatacccataatccccatctcyaaacaactcatattcattcaagtctcaactcaactgactatcccctctgcagcctcttttgatttgcccagacatagcagtttgttcatagtggttatcatgttgcatttatttgttgcttcaaaagatttgcaaggacaaggaccatggttttatttacttaaaaattaaataataaactttcattgctaacgcagggtttggcacgtagtaggcattcaaccaacattgaatgagttaacaccattagtttcacaaggaaactgaagcctgagaggccctaatcatgctagatcaggatgtgagtttaggtctttctggctttctgtctgctttattatggccagagtattgcaccgtagaaaatacgttttcctttggccagtaactgtaatcatctgttgaaattttctaaaaacattttaagaactatgaaaagcatttaatttattcctttggattttttccactgaattacagataattttgtgattttcattgtgaaaacagtagatgaggattcttttttaaggtctacaacaatgtatttttcctctgatgtaaccaccttcaggtgttttatactagggtaacccatatccctcaaaaggcagtgttttaagagtcatacagtgttaccatggaagttccaaaataaatactgaaagaaagaatgacattttagcctactataacttgaaattttcctgtatgtatgtacaatgaaataccttgttttttactgaaagtcattaattctgaaatatacttctagtttaaacctaagagctgataataacttcaaatataggactatctgctctgaattgctagagcaccatgattcatttcaaacagcagtgtccgcagataataactaacattgatggctcaaactgaataaaaagttgtggatgacattttcccattgatgactactaatctcaaaacatatcactacagtgacactagtccagttattttcttttctttgtcctttcttaactgttcataacatagatctgacttatttttgtacttgtttttaaatcccttttctaaatgaaagtgaaagatgaatggaccagaatgtatttctctgattctcctttctttgtactaaatttttaaaaaagttttctttgtgcatagccattgtatgtgtgttttttttttcctctttggatcagaaaccctgaataaaagcaaatctcagattgtatattgtctggaaaaaaaaagattttcattcccatgtataccatcaacaacaataagaaaacaacaactccacaaggttctactagagaaggaaatataatacattgagtaatagcatgggattaatagtttaaaactttatgaataaagtttctatgtaagcaacaacagtgggtccttcatcaattaacaatataaggcaaatgttaatgaattaaatctttttttttttttttttttttttttttttgagacggagtctcgctctgtcccccaggctggagtgcagtggcgcaatctcggctcactgcaagctccgcctcccgggttcacgccattctcctgcctcagcctcccaagtagctgggactacaggcgcccgccactacgcccggctaattttttgtatttttagtagagacggggtttcaccgttttagccgggatggtctcgatctcctgacctcgtgatccgcccgcctcggcctcccaaagtgctgggattacaggcgtgagccaccgtgcccggcctgaattaaatcttatgctggtttgtggcacagaatgtatgcaagggctgataaaataaatattcagattgcaaatttagacttaaaggttatggaaggttagagttgtataataatatttttcttgttttataaacttcgtttcttctccaggtcacataaaacaaatataataagattttcacttagcgatagtgaatgttagataacagtcattggatattcttggtttaatggaaagacgtttgacttgagttgatgagattgtgaattctgcttctgaaacctacttgctttgtgaccttgagcaagctatttaacctctctaaacattagtctcactatctgtaaaatggggatctctacttcatggaattgaataaaaaaaattaagacagcaactggcatgtaataagtaattaaaattaatggtcacctctgaaataaaggactacagcattctttcagagaaatagcaagaataacagttaaaaatgatagcctcattcataaaacaagtcattttattttctccctgcagattcttcataattccttagtttcctgaaacatttcaataactctgcagagaggatatggctttttaaatgtccaagtcttaagcagttggtgattattttcagggaaaggatgatagctaataattattagtcacttcctgtatgtgttatatgcattattttatttaaaactcaagtgatcccatgaagtttaggtactgttattgtatatgcatattatcatcactaatttattattatgaaccccatttacagtagaggaaactgaagcttatagtttgtaatttttccaaagtcatctgaacaagaaagtagcagagccaggatttgaacccaagtctctttcatcttcaggagtcttatttgtatgcactctgctatattacttttgcatatatactcagtgggtatgttatgggtatattttgatacacgtctgtatatcctggtattatctacttgttaacattcttactagtggtggaagaataaagaaactgaaaatgcttaatgaaattttgatattttaaaggtaactaaaaagaactttctaagcaagtaccacactgaaattacaatttaagtcaataggaaaatataatatttacttcatcttgttttgttttttctttttttttttttttgccatctctcaccttgtaatttaccctgttttatacaaagcatttcagagatgcttctgatgtgattggcattagccactaatttggtagctctgtttatggttctgttcttttcacttcattgacttttaacacacacttctccattcctattgctgactaccaaggtaatctgtgtactgtggttttccatcggtggttttgccacattgtttgaagttctacttctgtgtcatgcatctgctgagtttaatcataattaaggtttaaatcaccagcagttgcttggataaatcaaaataatattttaaaattttgattgattgccttaaatgtgaggaaactgagctacaaaagtaggatcgtggtggtaggtagtggaaattttagaattaaactccaaagagatgaagtctctagctcattcttggtgtcctaaaatatttcttgtattaacgaaatgattttataatagtttacatgtaggcttattaactacattttctttaatgagttggtttcttccagtaatacctgaagccatgaaagtagtattttctatattgcagcagtattcaacatggtatatattcaataagctattctttatttagcttaaaaaataaatatggtaggtccttttttcccccaactttattgaggtataattgacaattaaaaattgtatatatttaaggtatacaggttgawtatttgatatatatatatwttttttgaaatatttatcacaataagctaattagcatatcaattacctcacatttcttttgtttttcattttgtggtgagaacacttaagatctaccctcttagcagattcaggtatacagtattgttaactacagtcaccttgctgtacattagatatctagaacttatcttgcatgactgaaactttgtaccctttgaccaatatcaccccattttcttctcccctagcccctggtaataaccactctactctctttctatgagtttgactctttttatatttcacatataagtgagtaatatggttttgatgtttgtcccattaatcccatgttgaaatgtgacctccattgttggagatggggcctggtgggagatacaggatcatggggacagattcctcatgaatggcttagtaccatttccttggtaatgaatgagttcttgctcagttcacatgagatctgattgtttacaagagtgcagcactgcccccgcaacctctcttgctcactcttttgccatgtgatatgctggcttccccctttgccttctgccatggttgtaagcttcctgaggtctcaccataagccaagcagatgttggtgttgtgcttgtacagcctgcagaactatgagtcaagtaaacctctatttataaattacccatcctcaggtatttctgtatagcaatgcaaaacaaaaacaaacaaaaaacaaaaacagactaacacagtcagatcacgtagtatgtgtctttctgtatctggcctgtttcacctgccacaaggaaatggtaggatttccttctcttaaggttgaataatattcctgtgtgtgtgtgtgtgtgtgtgtgtgtgtgtgtgtgtgtgtgtgtkygcgcgcgcgcgcgygtatgtgtgtgcacacaccccgcccccaacatatatgcacacattttctttatccattcatctgtcaatgtatgtttagtttgtttycatatttggctattacagtaatgctgaaatgaacatgagagtgcagagatctgacacactgatttcattttctttggctgtatgctcagaagtgggattgctggatcataaggtagttctatttaattttttgaggactctccatactgttctttataatggatatgtagtaccaatttattccaagtggtaggtctttcaaagttacatcttttgggagaggtagcagtaagaacaggacacacaagcctgaaattattttatttcttctgtataggtgtgctaaaactctaataggccttctcaagaaccaagggcaatggtatactgtgtttctgtatacatatagataggaagattgatttttttttaagatcaaattagtgctattctgtagaatttcagcaaagaggaaatttttattgacttggtattaaagttgttgtcttatgtttctttgggtactcagagagattaactggcagtattttacatcccaaattgcagtgaaaagatcaattaaggtcaaagtcaagtactgatagagaataaactatcattcatacatacaggtatttcacccaggctctggctcagttattttcctgggattagaaggttggggagcaagtttttctatcagttccactactaatttagtgatcctgcaagttcctttctgtatacctcattttcctttctgtaaaatgtatattgaagtgagattgctttgtaggatgctggcctctggatgcctagtattgtgcctggtgccgtcccacatacggtgggatgcagaaatagacatgttccctgctctcttaggcttacgattttgtagatgggtgtgagagccattactgagttagaatggactggatttggtgattaatgagatacacagaatgagagaaaaattggagcagataatatctagatcaagctgttgaataggagttagaaatgagaaccagactttgagagagattaggattcgtgtagttatttcagaatcatcaggaactaatgacaaagaaattttaagttcattctttatatgatggaataggttatttgcctaatactattggcagattgagattatactcattttcttaaaattctggagtcatattatcttctaaaattctgtttctgaagtatgggatggaccctatttttagactgagtagaatgtaagtagcagggctgattaagcacactaataactgacatttagtgagttcttaactgtgaaccaggtattgtgcttttacgtggtttctttttaaatcttcatagccatccttaaaataggtactattgttaccatccctattttttagaagacgacactgaggcttaaagattctaagttactttatcaaatgagtgtaggtcagataggataaggattgagaattggcatggatttagcagcaggagatcactggtggccttgwtgcacagttttggtgaaatggtagagaatgatggaatgggttcagagaacgcagagagaggagcagaagatgataagtatgcacagctccctcaatgagtctggctgaaaaagggagccaggaaagtgaatgctagctggggaagacaagtagttgaggtttgttgttttagagagaaaggaataacaggatgtttgtgtgctgatgggaatgctgcagtagaaagaggaaagttgatgatgcatgggctagatggacaactgctggagcaatgcccttgaggtgacaagaggagatgggatctaatgcacatgtagagggagtgcatgggcagctggctcagagtcacagtagggaggcaggggtatgtaagggtgtggttgtagagaggtgggcagatatagaggtgagcgcttatgcaatcatttcagcaaggagaaaaatgtaagcaagactatctgagattgagaacagagggtgtttttcagggtctaaattctgatccagtgtgttccaagggtgggaggacgttccatttggttattttattttattgttccttttatgtaagatttctctggcgagcgtttatattattttatagaactcagtggtcactcttaagtttccattctccagttctaggtatgtaatacaataagtgcctaaaaacttggcatttctgtctttttttttaatgttacagaaaaggcaactgaaagacagaaattataattcattaaagattaagtagtgggaacaagatagtggtaagtcagaatgaagccataacacgttacttttacatttttgttgaaaagatctttgccttgctgcatgttagtgattgtcatctcccctcttccttgcaaactgctgtttaaggtgtagtatacatttgttgcccttcactgccccttttttctttttttctttcttttttttgagaccaagtcttgctgtgtcgcccaggctgaagtgcagtggcgcaatctcagctcactgcaacctccgcctcctgggttcaagcaattctcctgcctcagcctcctgagtagctgggattacaggcgtgagccaccacacctggctaatttttgtatttttagtagagacggggtttcaccatgtcagtcaggctgatctcgaactcctgacctcatgatctgcccgcctcggcctcccaaagtgctgggattataggcatgagccactgctcccggccccttttttcttaattacaagaaatcctgctgctcttcagtcattgcagtattaggactgaattcttgaaaataccaaataacttcctcacttaataatgaaaatgcctcttctctggacttacattgtttaaccttcataatacttgataatgttgaccatcttctttggaactctctttttccctcctaaggcttctgtgacattacacaactctgtttttttttttttttttttttycctcttttcttttattctgactgcagcttcttttatctcttccacttgttgctccctagtccttagctttgtgagccctatggagccmaagagcagtagaaagaaggtccttaccctccaggagctcatgttttctttgcacagaacttgacaatccaccaggctacaagsgttctgatatagtttggatctatgtccctgcctacatctcatgttgaattgtaatctctaatgttggtggaggggcctggtggaaggtgattagatcatgggggtggatttccccctttggtgctgttctcatgatagggttctcaagagatctggttgttaaaaagtgtgtagcacctccctgaccttccgcccgcaccccccaacctcttgctgctctggccatgtgatgtgtcttcttccccttcaccttctgccatgattgtaagtttcctgaggcctctccagaagctgagcagatgccagtttcctgtacagcctgctgaactgtgaaccaattacacttcttttctttgtaaattacccagtctcaggtatttctttatagcagtgcaagaacaggttcttgtcctagccctaccacatggcttctctgaggacaaatcattcaacctgtccctcattttcctcctctataagttggggatcagtatgaaaattacttcgtagggttattatgagaattaaatgatttaacccatgtaaagtgtgaagaacatctggacacataggaagagctcaggatgtgtttgccattttcattgcctatcccttacttccaccccacttgatgttcacatggcaaatgccctcacctcatttgttcaaatgtcactcacatagaaagccctaccctgaccaccttatttaaartatttaccccttcactgtcaccactcttgttcccttagtcagctttatttttctttttttttttttattttattattttttgtttattgwtcattcttgggtgtttctcgcagagggggatttggcagggtcataggacaatagtggagggaaggtcagcagataaacaagtgaacaaaggtctctggttttcctaggcagaggaccctgcggccttccgcagtgtttgtgtccctgggtacttgagattagggagtggtgatgactcttaaggagcatgctgccttcaagcatctgtttaacaaagcacatcttgcaccgcccttaatccatttaaccctgagtggacacagcacatgtttcagagagcacagggttgggggtaaggtcacagatcaacaggataagaatttttcttagtacagagcaaaatgaaaagtctcccatgtctacctctttctacacagacacggcaaccatccgatttctcaatcttttccccacctttccccgctttctattccacaaaaccgccattgtcatcatggcccgttctcaatgagctgttgggtacacctcccagacggggtggtggccgggcagaggggctcctcacttcccagtaggggaggccgggcagaggcgcccctcacctcccgggtggggcggctggccgggcgggrggctgaccccccacctccctcctggacggggtggctggccgggcgggggggctgaccccccaacctccctcccggacggggcggctggccgggcggggggctgaccccccacctccttcccggacgaggcggctggctgggcagagaggctcctcacttcccagtaggggcggccgggcagaggcgcccctcacctcccggacggggcggctggccgggcggggggctgaccccccccacctccctcccggatggggcggctggccgggcggggggctgacacccccacctccctcccggacggggcggctggccgggcagaggggctcctcacttcccagtaggggtggccgggcagaggtgcccctcacctcccggacggggcggctggccgggcagggggctgacccccccctcctggacggggtggctgccgggcggagacgctcctcacttcccagacggggtggctgccgggcggaggggctcctcacttctcagatggggcggctgccgggcggaggggctcctcacttctcagacggggcggttgccaggcggagggtctcctctcttctcagacggggcggccgggcagagacgctcctcacctcccagacggggtcgcggccgggtagaggcgctcctcacatcccagacgatgggcggccaggcagaggcgctcctcacttcctagatgggatggcggccgggcagagacgctcctcactttccagactgggcagccaggcagaggggctcctcacgtcccagacgatgggcagccaggcagagacgctcctcacttcctagacggggtggcggccgggcagagactgcaatctcggcactttgggtggccaaggcaggcggaggttgtagcgagccgagatcacgccactgcactccagcctgggcaccattgagcactgagtgaaccagactccgtctgcaatcccggcacctcgggaggccgaggctggtggatcactcgcggttaggagctggagaccagcccggccaacacagcgaaaccccgtctccaccaaaaaaatacgaaaaccagtcaggcgtggctgcgtgcgcctgcaatcgcaggcactcagcaggctgaggcaggagaatcaggcagggaggttgcagtgggccgagatggcagcagtacagtccagcttcggctcggcatcagagggagaccatggaaagagagggagagrgagacmgtggggagagggggagggggagagggagagggagcagctttatttttctttatagtactcattgtcacctgatattattatattatatattatactatattgtgtgtgtgttaccattcctgctagattgtaagctttgtaaggtcagggccttttatttgtttgctgctttacccccagcaccaagaatattgcctgccacagtgtaagtattcagtaagtatttgttgaaagaatgagtaagtagaatgcttatttaggtttattcatgcgtttgccaatggttttgtttaccatttcttgcatttcactatttctagattcagtttcatctttgctgaagaatagtagtttttacagccaaggtctctattagtggtaaactaacagttcttttctcaaaatatctgtattttcctgtcactcttacatgatattttagtataaaatactagtttggtagttagtctctatgctttgaagatgacattagtaatagtattttgtcttctggcttgtgttattagtctgtttgttgtttgtttataggtaactttttttctcattggttttaaggttttttctgtctttgtgttaaacagtgtcactgtgaattatttaaatgtagatttatttttatttatactacttaagacttgtgcatcttttgctcgaaaatttttaaatgcttctgatcatattaaacatatttattttgtagtctatagctggcagttctcttatcaaagttattgagagtcatcttgctttttgttatttctggtgagccttgtttgtggtaaagttgagaatgtttcttcagtaagggtttaacaagtcatttcaatatgtggcttgtttggaagaagktgtcactcctgagacatctgtgtttgcttcagccaggtgccttagggatgttacctgcgtaggcccacttttaggcccactttctctgcttaaggtagtgtaaaattgagtcataaatcacatgaggatgggccctttgctactatatctagggggcactttcgcttcactccacaaatgtagaacatagacccaagtagaaaaatgtacttttatttcttctgtctttaaaattctacgcttttaccaaggtggttgtcctttgagggtcctggctttatgtggtagtctcaattcaacttctttgacttgtgtggggctacgaccctgtctcagatctcacttgtgtcaataaatctccagccctcggatgtctgaggcccaaaacactgaaggactgccatgtctttagctcatgtgcttctatttctctctctctctttcttggctgttaggtatttcacttaccttatggtaagatcagctatgtatgtaaaaggatattggttacattttacttagaattcctgcatgttttattgtgggaaggttttcagcttatttatttttgttgtcactgcatattatttttgtagttctattatcagttcttgaggggcttatcttacaatttgttttctttgtgtgacttgtttatatttgagttgaggactcttcttcagcaaggctttagttgtagggtttatgtgaacagaaagagatgtctagtataattgtaaaatatgtatgtacattcagctaaattataggcttggtgaatgctggcagtatgtcacatgcttttagtatccacttggttttataaatcagtagaataatctcagaagttgacgataaactggacaaagacctgtgagaatttatctaaagttcaactgacactattttattatctgtagagtagaagttgtatagtcctgataatatgaaaaaatatcattgttcgtcaagttttaaagtctttagagttaggcaaaaaataaattaagtatcttaggtttttcaagttcagagatttttagaatttaatggtaaaggcaacgacctatctgtggagccaaagaaaagcaagatacaggcagtgattaacttgcctgggaatgatggaattccatcattagtgaaaggtttagtagttttcacaccccttgccccactctcaaaatgattgaatgaatggcttagcaactctaaataagatttagtatggctcatccgaaacactgacaagaatccactcaatatcccagcttaaataactgttgtgggtaacatcaaaatgctaggaatccaacccccaacatattaaatgggattgtataatttttggtgtgagaagtatgtctgtacctccagatcttaaaccatctgaaatttctggtttactattaccttggttaagttggatgataagtgttttctgtagtagttaagcagatcttttaactccagggagatttaaaattaaggctaggcatgtctaagaggataaaaactggtaatatttttctgttaaaggatatgtgtatatttgcatatttattttttatgtatttggaatatttaagaaaatgggctaatgagggtgacatgcatgcaattccactttaaatgtattatggaatgatttagacttgtgatttttttcatgcatgaaaatgcatgttaagtactttattggaactcttaggagaaatttaatattatcttatttgtaaacttaatttattatgtttataaaagtaattatatgtaaattatgctttactaagtaaggcaagaactaagaagaaaatatattaaatttataaatgttggttacaaaattgtggtggcattttattaaccaggtttgtaattgggaccaagcattattttaacatctcttaaaagcgggccaggtgcagtggctcacccctgtaatcccagcactttgggaggccgaggtgggcggatcacttgaggacaggagttcaagaccagcttggcccacatggtgaaaccctgtctccacaaaaatacagaaattagctgggcatagtggcacattcctgtaatcccagctgaggcagaagaatcgcttgaacctgggaggtagaggttgcagtgagctgagagtgggccactgcactccagcctgggtggcagagtgagtgagacttttttttttttttttttttttttgagatggagtttcattcatcttgcccagrctggagtgcagtggcacaaactcggctcatggcaacctccacctcctgggttcaagcaattctcctgcccccgcctctcaagtagctgggattataggcacgtgccaccatgcctggcaaattttttgtatttttagtagagacggagtttccccatgttgggcaggctggtctcgaactcctgacctcaggtgatctgccygcctcagcctcccaaagtgctgggattacaggtgtgagccaccacgcctggccaagagactgatttaaaaaaaaaaaaaatctcttaaaagggacttctaaaatctgctaggctcataagtagaaaaaaaaactagctgaatctgaaagctttaaggaaaaacttattttttgcatagttaaatttaataagttgaatattttaaaaatcaaagtaagcctctgaagagtattctctgcacaaaaagcacccttgaggatacaaaacaactcatatcaacttgtatcataacgttgtctgtggtgctcaatatatttctgaatgtgattgatttgcttagataatgagggaatgctttttttctttttttttaatttttttattttttattttttaaatttattattattatactttaaattttagggtacatgtgcacaatgtgcaggttagttacatatgtatacatatgccatgctggtgcgctgcacccactaactcgtcatctagcgttaggtatatctcccaatgctatccctcccccgtccccccaccccacaacagtccccagagtgtgatgttccccttcctgtgtccatgtgttctcattgttcaattcccacctatgagtgagaatatgcggtgtttggttttttgttcttgcgatagtttactgagaatgatgatttccaatttcatccatgtccctacaagggacgtgaactcatcattttttatggctgcatagtattccatggtgtatatgtgccacattttcttaatccagtctatcattgttggacatttgggttggttccaagtctttgctattgtgaataatgccgcaataaacatacatgtgcatgtgtctttatagcagcatgatttatagtcctttgggtatatacccagtaatgggatggctgggtcaaatggtatttctagttctagatccctgaggaatcgccacactgacttccacaatggttgaactagtttacagtcccaccaacagtgtaaaagtgttcctatttctccacatcctctccagcacctgttgtttcctgactttttaatgattgccattctaactggtgtgagatggtatctcattgtggttttgatttgcrtttctctgatggccagtgatgatgagcattttttcatgtgttgtttggctgcataaatgtcttcttttgagaagtgtctgttcatgtccttaacccactttttgatggggttgtttgtttttttcttgtaaatttgagttcattgtagattctggatattagccctttgtcagatgagtaggttgtgaaaattttctcccattttgtaggttgcctgttcactctgatggtagtttcttttgctgtgcagaagctctttagtttaattagatcccatttgtcaattttgkcttttgttgccattgcttttggtgttttagacatgaagtccttgcccatgcctatgtcctgaatggtaatgcctaggttttcttctagggtttttatggttttaggtctaacatttaagtctttaatccatcttgaattaatttttgtataaggtgtaaggaagggatccagtttcagctttctacataaggctagccagtcttcccagcaccatttattaaatagggaatcctttccccattgcttgtttttctgaggtttgtcaaagatcagatagttgtagatatgcggcgttatttctgagggctctgttttgttccgttgatctatatctctgttttggtaccagtaccatgctgttttggtyactgtagccttgtagtatagtttgaagtcaggtagtgtgatgcctccagctttgttcttttggcttaggattgactttgcgatgtgggctcttttttggttccatatgaactttaaagtagttttttccaattctgtgaagaaagtcattggtagcttgatggggatggcattgaatctgtaaattaccttgggcagtatggccattttcacgatattgattcttcctacccatgagcatggaatgttcttccatttgtttgtatcctcttttatttccttragcagtggtttgtagttctccttgaagaggtccttcacatcccttgtaagttggattcctaggtattttattctctttgaagcaattgtgaatgggagttcactcatgatttggttctctcatgattttgtctgttgttggtgtataagaatgcttgtgatttttgtacattgattttgtatactgagactttgctgaagttgcttatcagcttaaggagattttgggctgagacgatggggttttctagatatacaatcatgtcgtctgcaaacagggacaatttgacttcstcttttcctaattgaataccctttatttccttctcctgcctaattgccctggccagaacttccaacactatgttgaataggagtggtgagagagggcatccctgtcttgtgcccgttttcaaagggaatgcttccagtttttgcccattcagtatgatattggctgtgagtttgtcatgaatagctcttattattttgagatacgtcccatcaatacctaatttattgagagtttttagcatgaagcgttgttgaattttgtcaaaggccttttctgcatctattgagataatcatgtggtttttgtctatggttctgtttatatgctggattacatttattgatttgtgtatattgaaccagccttgcatcccagggatgaagcccacttgatcatggtggataagcttttagatgtactgctggattcggtttgccagtattttattgaggatttttgcatcaatgttcatcaaggatattggtctgaaattctcttttttgggtgtgtctctgcccggctttggtatcaggatgatgctggcctcataaaatgagttagggaggattccctctttttctattgattggaatagtttcagaaggaatggtaccagttcctccttgtacctctggtagaattcggctrtgaatccatctggtcctggactctttttggttggtaagctattgattattgccacaatttcagctcctgttattggtctattcagagattcaacttcttcctggtttagtcttgggagggtgtatgtgtcgaggaatttatccatttcttctagattttctagtttatttgcgtagaggtgtttatagwattctctgatggtagtttgtatttctgtgggatcggtggtgatatcccctttaccattttttattgcatctatttgattcttctctcttttcttctttatcagtcttgctagcggtctatccatttttttgatcctttcaaaaaaccagttcctggattcattaattttttgaagggttttttgtgtctctatttccttcagttctgctctgattttagttatttcttgccttctgctggcttttgaatgtgtttgctcttgcttttctagttcttttaattgtgatgttagggtgtcaattttgaatctttcctgctttctcttgtgggcatttagtgctataaatttccctctacacactgctttgaatgcgtcccagagattctggtatgttgtgtctttgttctcgttggtttcaaagaacatctttatttctgccttcatttcgttatgtacccagtagtcattcaggagcaggttgttcagtttccgtgtagttgagcggttttgagtgagattcttaatcctgagttctagtttgattgcactgtggtctgagagatagtttgttataatttctgttcttttacatttgatgaggagaactttacttccaagtatgtggtcaattttggaataggtgtggtgtggtgctgaaaaaaatgtatattctgttgatttggggtggagagttctgtagatgtctattaggtccgcttggtgcagagctgagttcaatwcctgggtatccttgttgactttctgtctcgttgatctgtctaatgttgacagtggggtgttaaagtctcccattattaatgtgtgggagtcttaagtctctttgtaggtcactcaggacttgctgtatgaatctgggtgctcctgtattgggtgcatatatatttaggatagttagctgttcttgttgaattgatccctttaccattatgtaatggccttctttgtctcttttgatctttgttggtttaamgtctgttttatcagagactaggattgcaacccctgcctatttttgttttccatttgcttggtagatcttcctccatccttttattttgagcctatgtgtgtctctgcacgtgagatgggtctcctgaatacagcacactgatgggtcttgactctatccaatttgccagtctgtgtcttttaactggagcatttagtccatttacattgaaagttaatattgttatgtgtgaatttgatcctgtcattatgatgttagctggttattttgctcgttagttgatgcagtttcttcctagtctcgatggtctttacattttggcatgattttgcagcggctggtatcggttgttcctttccatgtttagygcttccttaaggagctcttttagggcaggcctggtggtgacaaaatctctcagcatttgcttgtctgtaaagtattttatttctccctcactatgaagcttagtttggctggatatgaaattctgggttgaaaattattttctttaagaatgttgaatattggcccccactctcttctggcttgtagagtttctgccgagagatccgctgttagtctgatgggcttccctttgtgggtaacccgacctttctctctggctgcccttaacattttttccttcatttcaacttyggtgaatctgacaattatgtgtcttggagttgctcttctcgaggagtatctttgtggcgttctctgtatttcctgaatctgtatgttggcctgccttgctagattggggaagttctcctggatgatatcctgcagagtgttttccaacttgrttccattctcccgtcactttcaggtacacaaatcagatgtagatttggtcttttcacatagtcccatatttcttggaggctttgctcatttctttttatccttttttctctaaatttcccttctcgcttcatttcattcacttcatcttccatcgctgataccctttcttccagttgatctcatcggctcctgaggcttctgcattcttyrcgtagttctcgagccttggttttcagctccatcagttcctttaagcacttctctgtgttggttattctagttatacattcttctaaacttttttcaaagttttcaacttctttgcctttggtttgaattyccccccatagctcagagtaatttgatcgtctgaagccttctctcagctcatcaaagtcattctccgtccagctttgttgcgttgctggtgaggaactgcattcctttggaggaggagaggcactctgctttttagagtttccagtttttctgctctgtttttttccccatctttgtggttttatctacttttggtctttgatgatggtgatgtacagatgggtttttggtgtggatgtcctttctgtttgttagttttccttctaacagacaggaccctcagctgcaggtctgttggagtacccagccgtgtgaggtgtcagtctgcccctgctggggggtacctcccagttaggctgctggggggtcggggtcagggacccacttgaggaggcagtctgcctgttctcagatctccagctgcgtgctgggagaaccactgctctcttcaaagctgtgagacagggatatttaagtctgtagaggttactgctgtctttttgtttgtctgtgccctgcccccagaggtggagcctacagaggcaggcaggcctccttgagttgtggtgggctccacccagttcgagcttcccggctgctttgtttacctaagcaagcctgggcaatggtgggcgcccctcccccagccttgctgctgccttgcagtttgatctcagactgctgtgctagcaatcagcaagactccgtgggcataggaccctccgagccaggtgcgggatataatctcctggtgccgcgttttttaagaccgtcagaaaagcgcagcattcaggtgggagtgacccgattttccaggtgccgtctgtcacccctttctttgactaggaaagggaactccctgacccctcgctcttcccgagtgaggcaatgccttgccctgcttcggctcgtgcacggtgcgcacacccactgacctgcgcccactgtctggcactccctagtgagatgaacccagtacctcagatggaaatgcagaaatcactggtcttttgcgtcgctcacactgggagctgtagaccggagctgttcctattgggccatcttggctcctccccccacttttttttttttctttgagatggagccttgctgtgtggcccaggctggaatgcagtggcacgatctcaactcactgcaacctttgcctctcagattcaagtgattctcctgcctcagcctcctgagtagctgggattacaggtgcccaccgccatgtacagctgatttttgtatttttagtagagacagggtttcgccatgttggcatggctggtctggaactcctgacctgtagtgatctgcctgtctcggcctcccagagtgctgggattacaartgtgagccactgtgtccgacccttaatacagccttttacgttgtatagcatagtgcctttcattcattaagatttagctatttgttgaaagaattaataatattttaaagattcctacttacgatacttgtttataatctgatagcaaataattaaaaaattctaaagtcctttttagaaccagaagttatccttaatgattaaattctggaaagttacttggtttgtgaagacaccactgaaatttagtagaaaaaggtgggtcctatcagtaaatgcttctggggtaattgattatccatttgggtgaaaaaaaatcgagatactcttcttccccacctcacgtcgtacaaaaattaatataaaataaccaatacctaaaatattaaaagtaataaagtaaaacttctagaagaaaacatgggagggatatcatcatgatcttgcggtaggcaaagatttattaaactggccactaaagcattaaatataaaatattgataaattggacttacagaatcatgacctctttatcaagaaagataccattaagagaggtaaaatacctttataacagacttgcacctgtacatgtacccctgaatctaaaataaaagttgaaaataaaatgcaaaaataaagaaaagagcaaatcacacactgggagaagatatttgcaaagcatatatgtgacataggactcgtatctagactatataaagcagtaccaataacatttacaaataatattgatatttaatatagctttgaaagaggaagtattggatttcgaaggaswtgaggcttatttgcatgtgatagaataaggcatatttcttattcctatagggaaatctcaaataggagaattgaacacagcacagatatttttgtctttcacctgcagatctaaccagttattctctaaatttgaagtgccgtaagctagtactgtgtcagtctgtttgaccattagagcagaggtcaaggatgctatgtaatcctactaaagtctatttttacagagagactagtaaaagaagccttgagacctttattgtttacacagcctggaagctgtcactgagtccttaaattgaagcatgacattgtgcagtgatgtgctagtggacaaagaagtacagaacagaatcaaggatgtcctttgggaagtccacagagtctgttacaaatgtaatatccaattgcagtgagatggaactgaagacttacaaagcagaggcacacttcctatgagacaggggccttgccacaaacgacacgtctggcttcttgagcagtttcactcagactatttaggagcccatcagaatattcagtggcagaacaaggtcagtaatggcaaacactcagaatgcagcctgtgtaagagctttgaaccaattcttccacaatacagctttactgagcgggatttgtgtggagaatggactacagcaggactcctaggcggccattgaatcgcaagctgaggtggggaaagcgcaagctgaggaggcagaaggaatgttgtctgagacctgctgcagtgcaccctgagcagtgaggtcacagcaagcccagccatgggcaagcagcctggcatccagctgggagggatgggattgctgttggtgagcagaggctctggctagctcttgagtctaaaaagcaggaccacaaagaaaacagactatttaaatagcaggtgaagccgcttacaaaagagcaaacttgatgcaaattctgtgtggaaaagattgttggtctcattttattgtctttggccatacycataaatctgactcaggaaagacatttatatgtacacaagtgtatacaaataaaagtaaagttttactctattactttccaccccttcatccaaaaaaaaaaaattaggtcaaaaaacagtggtcacattgaaatactagaaatagagcaatttaacaattacaattttttattctttaccagactcgtcacatttttattttataggtagaatgcttaaaagactactaatgtcctaaagatgataatgtaataatactttaaattttaaaatgcctcatagccattactatgcactattttgtagttgctttcctgaggatttctttcacaagattgcttgtctttgtctcctcctagggtcagtgtggtagaggccatataccacctaatgggtgcctcagtaaatacttgtttaactggactgaactccaaggattaagatgtcagtgtatgtttacctcatagatagacatacggtttttgccggccttctagaaatttcacgatgtagtctaattccaacatctaaatatgctgtatcagactcacaacatgttaacacatttttttttctttttttttctttttcttactgttttggcccttagtttgcaaccttcatggctttttatccattttcctatctttgaattatgcatatgtgtcaccttttctgatatgaggaacggaactccatgatgagttaggtgaattataagtgtgaggctggaaaggggataataatagatatggcatgtggttaaaaatggaatacacatatgggatctagagggctacagatacatacatagctatagwaagagaaaaggtaggaaaacagaggtagagacatttcaagagagaactaagattagacacgaagtgatagagtccctttcccaagaatcaaaaagagacaaaaactgtgctgagaagcctcaaaactttaatgtttgcaggagacaagttccacagtagatgaaacaaaatatgttattttgcatgcatacttatatgtatttatcaaaatttttaatcacatttggaggactgtataatttgaatgattctgtgatttttagacattctcaaaacatgaatattttaaaacataattacttaaagaagatttcattgttagctctgccatttgtaatttgatgaatgaaatgtttaattttccattatagaagcagagaaaatcatcttggttgtaaaacagaaattagtaaactgtacaaatagacttatttagaacttctgtccttacagcttttaatgcttttttctaaaaaaaagttacttattcttggtttaggacagtaatgaataaaattattgcctttccattatgttgttaagattattagatagggatagtctgtgttgccctctattggtgattaataattaacttttgacagaataattgctgctttatgtgtcatttgtgtgtatttaataattgtatcagccagtatattttagaaaaaagaatttgggaaaactaacctaatagttgtggccatgaattggccaaaggtgaaaaaattagctttcgggctttttgatttaacaattttattgactaagatagtattgacatacttttgcctttgattaattttaattttaattttaattttttttttttttttttgtcagagctccacctcagatcaggcgtcccaatcgagaagtaagacctctgaggaaagaaatggcaggagtaggagcccggggacctgtaggccgagcacatcctatatcaaagagtgaaaagccttctacaagtagggacaaggactatagagcaagagggagagatgacaaggcaagatgctgtctttctgtaattcactcacttgaagcccaggacttttggtggatgttatgatttttgttggcttttcaagataccctggttttgacgtggaagagttagaaaaaagtctcattcaaagcctaagtagtctttgtattttgaaggccatgctgcaatgcaaatcacctcagaggcgtagtaaatatctatatacacatacatgtataaaaatatttagtgaaatggatcccttgtaagaaaaaatacggctttaaaacttttttgaaaaatattttaataagtattctgaatagaaatgagcaataaatgaaaatagttatggggaaagacaagaaggtagatgtatctgttcacagaataagatgagggatatgatttactactgccaaaaataagtatctttgatttatctgtagattatagtagaacaagattttttttcttttccttgagaagattccccttgcttagggttcattgtgcacacgtacttatttaggaaattgattggtgaataaacatagtattcggtggaaattgtacttcccttaaaatggacttaggacagtgggttgaagataatcttacagattaaggaggtagccaggatgatctgatgtgtctcttaggccttaattttagtaaaaagagaaaaatttttaagtgatagtatttcctgtttccaccgtgatgtcataaatgaatgataatgtaatcaaattgccacagaaaagttttattttactagttagagattcaggatctgtcatcacattcaggccatgatatgtataataaagatatatctaataacaagtggttatccatcaaaactgtatttgaatatttttattacgtgtaattttgatctgtaggtaaggactccagaccaacttcctaggtcttatagccataatacatagaccaagatagaataaaattggtgttttctgaatatttctatttatgagatagttcaaagacatattctacctccctgcctcaataggacactgaaaatgaattagatttttttaatgtttgtartttgtgggagcttttatgccatgaaacagcaagtgattctatttcagatcctttttgggattagtgaagggtagtaataaatacattaacttttaaaatttgttccctccattatcaaaagccacataaatggatacttgaaactctttatcttaaatattatttttgtttcttttcttcatttttatgcagctaacattggtttgcattatagagaatacagtaccggctgaaatccaacctccagtttgctagtagcttttagataaacctttagaacagggtaaggaactttcagtcttgaatttacataagagaaaccatggtgacggtttactggatgctgctttgctgggcaccgttcaaagtgattaaacagtaattcatgaagcaatcccgtgaagtaggtgtcttactatcccgactttacagatgaagaaactgtggtacagagcgctaaaacttgccagcstctcacagtgagacatggatactggaagaatggaatttgtgaagtcacacatctttttcctgtttaaccttaagatttttcatgttatgtagttccccacctaccaagctagatgaaaagtctggattggatttaccaaaagagatccagaacaattaaatgttggtttttaaatgtgactcttaagcaaagaacaaaataatcaagcagcattttttgaatgtcaaatacatttttttttttttttttttgagatggagtctcgctcttgcccaggctggagtgcagtggcacaacctcagctcactgcaggctccacctcccaggttcacgtcattctcctgcctcagcctcccaagtagctgggactacaggcacccgctaccatgcccggctaattttttttgtatttttagtggaggcgttgtttcaccatgttagccaggatggtcaatacattttttttcctggaaattataaattgtctttcatttataatgttatcaaatgattttctaaatcttagttattctttcattgacatgtaagtactcagaatgtcactagaaagtaacccttttatgtaagaaaagaaaagaactccgcagttgtttggagataaaagataygttctgagtcactgtggaaacagaggggactacagtttttcaaaacaaactcatgcaaacttcataagcctttgaaaggtatatttgactcagttacaatttttgtaaccacacaaatattcattaggatactgaagttcctgaaactcactgaaggctgcgataggttttgaggcagcttaggtgaaactaatagatacccacttctgctaaaagctcatttgaaaatgagtgttggggccaggggcagtggctcacgcctgtaatcccagcactttgggaggccaaggcaggtgaatcactttagcccaggagttcaagaccagcctgggcaacatagtgtaaccccgtctctactaaaaacacaaaaattagctgggtgtggtggtgcatgcctgtaatcccrgctacttgggaggctgaggcatgagaatcgcttgaacctgggagggaggcagaggttgcagtgagctgagatccagccactgcactccagcttgggcaacagagcgagacttggtctcaaaaaaaaaaaaaagaaaggaaaattagtgttgtttggaagtaccctcagagatatgggagtccccagtgtttattgtatttgtttttcttaagatcagttttgtgtattgctgccagctttaaaattgaagcagagtagaacagaaaactcagtttattgcccataagtacagtattattttgataaaaatatatacaaatttattcatatgtttatgtacaccagctcatgatccagaatgcatttattactttgtgcctgggtcagaattttgaaagctgctgcagcactctaactatgtacttaactttatagatgtaaaaaaaattgaggataagagaagttagacataycttgcttaaggtccctggtatatttttggatttttaatttggtgttgggaactgtatgatggaacaactaataatagcagtagtagcaaatgttagtcttccttgagcgcacttatcctttttgaagctttctacaaaaaaagcccgctttgaagctttttacatttattggtttatttgatccctgcataatcctgtgagctcagcattatttttcctgttttatgtgtagagaaattgagacactgaagtcttaactgcaaatagatggtgaactaggatttgaaccttgtctatgtgtaatacctgagttttttaatcattatgctatacagactcttatttgaaaatgcttactgtcttcttataataatacgagtttattttctgagactgattatgtcttttttctttttcttttttaaaattactgacaggcttcaggttagatccaagcttaaaatgctgtttttcagtaagtaacaatcactttgcatagtgatctattgttgaggctttatcattttcccccctgaggtctacagggtcatccataaggctagttagtactctgtttattggacacatctttattaagtgcacatttgtgtcagtaatacttctaggtgctagaaatacaaacgttaatgaaatgtagctcctggcctgaataaattaacttttaagctatattttttctgttttatttcagtgtgtctggtctcttcctactatgacaaaatagcttacacagggtaatttagaaggagtagaaatttatttctcacagttttggaggctgggaagtctaaaatcaagccactagcagatttggtatctgctgagggtctgttccttctagatggcaccttcttatgtgtccttacaggatggaaggggccaacaggctcccttgggaatcttttattagggcactaattctgttcatgagggcagaagcctcattgacctaaccaccttccaaaaaccctgtctcctaataacatcacattggggcttagataccaacatgaattttggaaggacacaaacatttagaccatagcacctgggaaaatcggatttattattattttgctatttaagcttagagtcagatatatacatagaagtaacgaaaggattttttttacttaagaaggataatctaaaagtaaaatattaggtagcagaagaaatgtttttgttttgtaaccttaatttataaaactctgattctcaagtattttttttttttttttttttgaggcagagtcttgctctgtcgcccagagactggagtgcagtggcgcgatctcggctcgctgcaagctctgcctcctgggttcacaccattctcctgcctcagcctcccgagtagctgggactacaggcggccrccaccacgcccagctatttttttgtacttttagtagagatggggtttcaccgtgttatccaggatggtctcgatctcctgacctcgtgatccgcccgcctcggcctcccgaagtgctgggattacaggcgtgaaccactgcgcccagccaagtatttttaagattatagttttatggttaattaactcagtgaaatgagcagtacttccattatctcatgattaaagctatatatgcttctaaatagaattcagattaaagtatggcaaattatattctctgaattcattttaaagttgttaaaggactttatttcattaaattgtgcataacaaatggccatttatcatgagaagactttccttctcatgagtaagtctagggatatctgatatggagagatgttgcaaactagattgacatattcttttgagagctattgattgattatacaaatgaacagtgacttcatagaaaatatttctactgaagaaaagtgcacaaattgtatacttttttgatgaataatgataatctagccagtggtgtatattagtaactacttttatgaaaaaaaggtgtatgtgtgtatacacattaaagaataagatgataatgaaacaataaaaacatgctagagctttactcattgatcaatgacttgagcagttttcaaatactggaagaataatcagattttttatgctatttacagtgtaacaacagcaaaaatgacatgcttttaagtttagtctgcattattaacattttccccattacttttctaaatctagacagtcaggaaaacaataaatcaagccctgatttatagcatttgctaattctgtgatataaataccacctgtatgatggatttcaacatcatgtcactgaactcatagttgagatgagtttgggtagcagcctaccattctatggtgtttccaccatagagatacaataaactatggaacctcaagataataggtaatagtaaaataattaggatgtgaggagttttgcgtatttatttccttttttaaaaatacaacttattcaaagtttgtgtaatttaatatttattaatggctgcatttcacggctggctcacaaaatttctgaaaatttagtagctggctctcaaaaactagtaagaaacaacttcagcatctcactgcatgtaagccttgtaattcaatgtaaccatcagctctggggtcaagaaatcgaacatttggcacctcagaagccatattcatgatccctcccaatccttgccacttacctctttcccaaaggtaaccactgttctgatttctaatgccataaattaattatgcccattttggaactttatgtacagtaagtattcttttgtgtccagctttttttgttcaaggtgtatttgtgagattatttcatggtgttgtatatatttgtagtttattttcattgtcatatagtagtatatcacagttaaaatctgttttcttattaatggatatttgggttgcttttagcttgagactcttgtgagtaatgctgctttggatggttttctgcttatcctttgacatatatatgcatgaatttctagtgagcatatacctaggagtggaactgctgggtcataggatatgcataaattaaactagggaagaacaccagtttccaaagtggttatacaagttttccctcttacctacagaggggaagtttcagttgctccacatccttgtcaacacttgatgttgtcagtctttttttttttttgagacagaatttcgctcttgtcgcctaggttggagttcaatggtgcaatctgggctcactgcaacctccgcctcccaggttcaagcaattctcctgcctcagccttccaagtagctgggattacaggcatctgccaccacagccggctaatttttgtaattttttttttttttttgagacggagtctcgctctgttgcccaggctggagtgcagtggcaccatctgggctcactgcaagctcsgcctcstgcgttcacgccattctcctgcctcagcctcctgagtagctgggaatacaggtgcccaccaccacgcccggctaattttttgtatttttggtagagatggggtttcactgtgttagccaggatggtcttgatctcctgacctcgtgatccacccgtctcggcctcccaaagtgctgggattacaggcgtgagcccccgcacctggccaatttttgtattattagtagagatggggtttcaccacgttggccaggctggtctcgaactcctgacctcaggtgatccaccygccttggcctcccaaagtgctgggaatccaggcgtgagccattgcgcccggcgttgtcagtcttttttaggtataatcatatctcattgtgattttcccaggatatttgccatgtggtgtgtatttacctgataatttatgaagttgaaaaccttttcatatgttcattggctatttgtatcatcatgacttgtttttaagaaacatctttttctgtcctttgaatattaagttgctccacaaattttgtctctggtggtagctaatttatagtgctgggttttgtttttattttttttaccttgttgtactagattatagtaaagtagtttttatatctaaataactatttgaccaaacttgtgatttagaattctaaacccatttgtggaaatatgtgctattctggttttttactcacccaccgttgtttttttcctgtgcaaatgtcagcttagtctttgacagggatgagtcttaggtcataggaagagttgcrttcaaatattttaacctcttattcagaagactaatacacatacttttcttagactgaacagtctttctgtatttcagccttgccaagtgasagtgctttagcttcttgattttagaatttgtatatccttattgaactatcttaagtttcccactttcaaggctgtcttaataggagtgcatgagctcttatttaatgtggtatttggtatttcttatatggtaagattaaatgtggggccttaatagccgtatatgttttttcttatcctctctcagactctaccactcattttagccattctgtatactacagaaagtgtaaaataaaacatgagagaacacactgtccctggcttgttggcatcagagcagccagagagttcctcttaaatataggtcagattgtgtcttctgctcataactttcagtggcttcttatcttagattaaatgccaagtccttataatggtctacaaggctctgcatagtctggcatccatttcttctttgacctcatcttctttctcccctcctctcatttctttctgttggtttctgtgttgttcctcagatttgtgaagtatatgctgactgtgrcaaatttgaacttgctgttctgtctctgttttactatatattttacttattaatatattgtgcctcctaacttgagtatatgcctcatgagggcaggggtttctgtttggttcactgcgatatcctcagtgcttagaatagtgcttggcacatagtactggcaaatattgttgaaagaacatacgtattgataggtgtgcagaatgatatggattcataatttcaatttaaatgtattaacactcaaatgcagggcatgatactgaaattagtaagcactgtttgcatttattaacttattttactttgtaaaataaagtcttaagagtgggatgcaatttagaaaccttgtctaactttttcctttgttgtttctcacactggggtargagtagcccaggggtgtgcagcagtatgctagggtacaaagtggttgaaagcactgattctggagctgtattccctaggatctagctgcgtgtccttgggcaatttacttaccttttctgtgccttggttttctcatctatgagatggaaataataagagtacctacctcataggacttttaggattaataagagagttaatatatatccagtgcttagaacaatacgtggcacattgtgtaggcagtatatgagttttagttatcattgtaacatgaaagtggggaactaacacagatatgaaatagaattcaaaatcactttttaaaaaaagaaataattgccattctaattgtgtgagatggtatctcattgtggttttgatttgcatttctctaatgaccagtgatgatgaacttttttcatgtttgttggccacataaatatcttcttttgagaagtgtctgttcatatcctttgcccactttttgatggggttatttgtgtttttttcttgtaratttaagttccttgtggattgtggatattattagccctttgtcagatggatagattgcaaaaattgtctcccattctgtaggttgcctgtttgctctgatgatagtttcttttgctgtgcagaagctctttagtttaattagatcccatttgtcaatttcggcttttgttgccattgctttggtgttttagtcatgaagtctttacccatgcctatgtcctgaatggtattgcctaggttttcttctagggtttttatggttttaggtgttagtttaagtcttaaatccatcttgagttaattttggtataaggtgtaaggaaggggtccagtttcagttttctgcatatggctagccaattttcccaacaccgtctattaaatagggaatcctttccccattgcttgtttttgtcaggtttgtcaaagatcagatggttgtagatgtgtggcattatttctgaggcctctgttctgttccattggtctatatatctgttttggtaccaccatgctgttttggttactgtagccttgtagtatagtttgaagtcaaggtagcatgatgcctccagctttgttctttttgcttaggattgtcttggctatatgggctctttttggttycatatgaaatttaaagtagtttttttctaattctgtgaagaaagtcartggtagctaatggggatagcattgaatctgtaaattacrttgggcagtatggccattttcacgatattgattcttctatccatgagcatggaatgtttttccattagtttgcgtcctctcttgtatccttgagtagtggctcgtagttctccttgaagaggtcctacacatcccttgtaagttgtattcctaggtattttattctctttgtagcagttgtgaatggaagttcactcatgatttggctctctattattgttgtataggaatgcttgtgatttttgcacgttgatttttgtatcctgagactttgctgaagttgcttatcagcttaaggagattttgggctgagacgatagggttttctaaatatatagtcatgtcatctgcaaacagagacaatttgactttctctcttcctatttgaatcccctttatttctttctctttcctgattgccctggccagaacttccaatactgtgttgaataggagtggtgagagagggcatccttgtcttgtgccagtattcaaagggaatgcttccagcttttgcccattcagtgtgatattggctgtgggtttgtcatgaatagctcttattattttgagatatgttccatcgatacctagtatattgggagtttttagcatgaaggggtgttgaattttatcgaaggccttttctgcatgtattgagattatcacgtggtttttgtcattgattctgtttatgtgatggattacatttttgatttgcgtatgttgaactagccctgcatcccaggggtgaagccaacttgatcgtggtggataagctttttgatgtgctgctggattcggtttgccagtattttattgagaatttttgctttgatgttcatcgggaatattggcctgcaattatctttttttgttgtgactctgccaggttttggtatcaggaagaggctggcctcataaaatgagctagggaagagtcccttttttttttttaattgtttggaatagtttcagaaggaattataccagctcctctttttacctctggtagaatttggctgtgaatccgtctggtcctgggcttttttttggttggtaggctattaattactgtctcaatttcagaacttgttattggtctagtcagggatttgacttcttcctggtttagtcttgggagggtgtatgtgtccaggaatttatccatttcttctagattttctggtttatttgcgtagaggtgtttatagtattctctgatggtagtttgtatttctgtggaatcagtggtgatatccgttttatcattttttattatgtctatttgattcttctgtcttttctttattagtctggctagcagtctatctgttttgctaatcttttcaaaaaaccagctccttgattcattgattttttgaagggtttgctggaaaggatatggagaaataggaacgcttttacactgttggtgggactgtaaactagttcaaccattgtggaagacagtgtggcgattcctcaaggatctagaaccagaaataccctttgatccagcaatcccattacagggtatatacccaaaggattataaatcattctataaagacacatgtacacgtatgtttattgcagcactattcacaatagcaaagacttggaaccaacccaaatgcccatcagtggtagactggatgaagaaaatgtggcacatataccatggaatactatgcagccataaaaaaggatgagttcatgtcctttgcagggacatggatgaagctggaaaccatcattctcagcaaactaacacaggaacagaaaaccaaacactacatattctcactcataagtgggagttgaacaatgagaagacatggatacagggaggggaacatcacacactggggcctgttggggggtgggggactaggggaaggataacatgaggagaaatacctaatgtagatgatgggttgatgggtgcagcaaatgaccatggcacgtgtatacctatggaacaaacctgcacgttctgcacatgtatcctagaacttaaagtataatttaaaaaaaagaaaaataatgagatttccaagaaattttgcactttccttgggccattgaaatcaggcaacagatgaataaattaggcaagtgagaggcagtggctttacaggaaaaagatcagctataattaagcttagacatccgtgtgactatgacccagtgatttttattactaattggccagtaatttccgatgcgtggtagcttactacctaatgagttgattcgtctgttggacagaatctattgttagaaaattctttcttttgctgatctgaaatctatctcttttgttactggcccttgctttttttttttttttttttttttggcttaatacctagtaggcctgttggttgtattgccccattagaatttacttcttcagcttaaatgtctctagtttccttggtcttcctccatatgacatgggttttgaaccctttatcatcttgattattcttccctgggtgtaatttatcagtatttctcttaaaatgcaagacccagagctagtaactgatcatgttttacttaatctgccagtgtgagaggttgcatagtaaaatgtaagaaacatttgcattttagggcaaactatatcattaattggctctgtaatatttggttagtcactttgagcctaattttcctcaaatagaagattatccaacactaatgaaagatgagtaacaaagctttcttgatatgggaaattttgatgttagtaaaaagaagctaaaatattttgctttcatgagaaaaaaagtatatcaaccttcatgctaaaaatcaaattcttgctaatgttgaccttagtcaactcatatgaaaatctaaggaaagaattctaagatcatttcagtgacattgcagttagtagtatttatgtacacttagtaatatcttggagaggttagctttatttcctttaactaatagtttcctttaggtattgcatttaatctagctgtttatatttgatgtctgtattctaatttaagtattttttatgaagaataactgtcacccattttactgatttcctggcataaccaaattaattttagttttcctatgtctgttttttataacctcaccattttgatttgaaaacgtttccagaatcttttttgtagtcctcgatyggtattcaagtctcatgtgtaccactgagaaactttgggttctcgggcaggtcatttaactggcctatacacacacttcttcttcagtgtagtgagaggcttttagttctttgattctcctcctctaccccgtcctctataggagccagaagaaatccaaactcacctctgcccatatcttcaacctctttcttctgcgcaatacattttattatactggctactcaggttttttcacagcacttcacagtttatgtgtgtttttgctttatttacttgttactcgtttcccccactagactagatgcttgatgagggcagataatgtattttcattcactgctctaaaacctaatgcacaatagcatgtattgcacgtagaagatgcccaaatatttactgtttttaaaatcctatgatactcctattactttcagataggcatgcagctttttctttctcctgaggtagtgtttattaagttctttccagccacttggacattcatattaaaatgaaattttaattttaacttgataagtgtaaattacagtgccatatgaaggctcaagctccagatatgtcagtttctgttgtattctttcgttgatacgtttctagaatagtttttaaatgattacagaatgttcctagtgatttgtttgaatatgacttggtagccttggcctatctgtactataaaatttgactctagcctaagcttaagtttgttgatgttatgtttcttgtgtaggtgccaaaaatttactccttttaatattgtcagtattgatatctgtcatctggaatgcaagaatcttcgggaaaatttactaataaatttaatgctaccgccatactgcccagaaataatttatttttttgggtgaagtaccagaatactgtttggtcacttacctagtggcttgaaggaaccagagcatctgtccaagggagccatttagtttcctccagcacttatgattgagccttttgactatctcagaagtgggattggagaagtttgtcttgttctcttgtctcttttccggttgaagtttaggagattgactcattttgaccattttcttgtttygtttttactctaggcagtaactggggctaaagctctggggaggcacttggctgtgcttgctgaagtatttccatagttggactgtctctggcaaataagtgaatttcatttaaagctcgtcaaagctgtgtgaatcttggcagaaccccatagaaaccatagcataaaatttcttttaaaacaactatattattaaatgaagaatttggggtaaagcatattgctttaatggtcttaatactatttaaaaagatccttccacattaatattcaaaatgttttctagtagtggtggaaatcctctgcgtctaccagttcaaaggtaggctttcccagtcttttgggatctagcaaggatcagtttagtcttacctgcatgcaactgttcctgcaagaatgtagatttgaagtttttaataaagttgaccagttcatgtatttctgatgaattaaatagaggagaatggcatttgagtaatcagaaaatactaccttaaaataataaaaattatttagaaagtgatggcattataatgttttcaaagcgtaatgatgttaactaaattatccattactgactagtactttttttttatacctatccccagggaaggaagaatatgcaagatggtgcaagtgatggtgaaatgccaaaatttgatggtgctggttatgataaggatctggtggaagcccttgaaagagacattgtatccaggaatcctagcattcattggttagagtctttcaaattattgaattaaagtagaggagaacacaaattataggttgtcttggtgtgtgagttttctcttgttattyattaatctgattatgaccacatctataatatgaaagtatagaattgaygagacagttctgtcgaatrtaaccaaggacattttacatgttartttgaagttgatgtgtaactgacaagttgttaattcaatgacatgtcctcattaataactaatgttttcactgatctttttatgcagtaagaattagaataatgttcttactatgagaataatttcataartaaaaaaaaattaaaagaattagttttgaccataaatcaaagatccctgagtaaacattatgaaagtttgctgttctttcaaagggatgacatagcagatctggaagaagctaagaagttgctaagggaagctgttgttcttccaatgtggatgcctgactttttcaaagggattagaaggccatggaaggtgagaatttattaawttggttttgatataagaatgctacttggcactggaatgaaagrcagcattgctgtagtttttgatrtatttaacccattttgaaaaggttgggagaagtttatgtacacccaaaacacctggatttgaatttgtagttgtgatgtgttacatctgcatagcaggagagatgggcttggagtgttgaaactatatagtctttaggtcacttcactcagggatgctgagctagagattagttttaagaattttctggatgtatggttctrtaaataaaaagttaagcagattaagcagaaataatatatggtcttatagaagaaaggtgtgatcaaacagttttcaaaagttggaatatttctcactgatggttaattattttgttttacttgtcactgacttgaaaacaaatgttttttctaaaaagaggtctttagctgtgttttaaaaaactacttcttggctgggtaccgtggcttacacctgtaatcccagcactttgggaggctgaggagggtggatcacgaggccaggagatcgagaccatcctgcccaacatggtgaaacctcatctttacgaaaaatacaaaaattagctgggcgtggtggtgcatgcctgtaatcccagctactcgggaggctgaggcaggagaattgcttgaacccgcgagttggagtttgcaatgagccaagatcgcgcaactgcactccagcctggcaacagagtgagactccwtctcaaaaaaaaaaaaaaaaaatcacttctgtatcattacaaaatatctgactttatcaatttattttgtccttsctgtgcttttgtagtatttattggcaaactggattaagaaaataaagatatatttctaaagaatctttttcctgaccaaataatttttttctgcaacagtagaataaaattcttgaatagaactattacgtttttttaaaaggttatgtctgaattttttagggatttgtgagaatagattatttactgaaatgggacaataaatgtattttatttattttttgagactgagtctcactctgttgcccaggctggtgtgcagtggcatgatcttggctcactgcaacctctgcctcctgggttcaagcaattcttgtgcctcagcctcctgagtagctgcaattacagatgcgtgccaccatgcccagctaatttttgtatttttggtagaggctgggttttgccatgttggccaggttggtcttgaactcctggcctcaagtgaacctcccaccttggtctcccgaagtgctgggattacaagcataaaccactgtttcaggcctgataaatgtattttaaagaatacatgaaaataaggagacctcagaaatttttcaagcttctaaaattggtctcaaaatgtaaattccagaatttcagaactggaatgagtctttgagatcatctcaaatccccactatttggcatactagaaaattgaagtccaaataggttgtgacaaccataatagacctttagaaaatttaaaattcaatgtgtgtcagcttcttaggtttatatgtgcctttctgcggcacactttctcctgcattgtgtgataccattcctttatccgtcaagcacttatttagccctgttataaacagggttccttgtttttcaagacatagtccctgagctatgagacatcctaaatggagagttgggcagttacatatagctttcagtgttaggcactagcagagcctaatgggtggtacagtccacatgtgcttggaaagctcagcaaagcacaaaaatgacatgattaaagaaggctttatgcttgaggacgtgggattcaagctacaatttgtagggttgtgaggatttcgctatgttggaggagacattttggagatgtaggaacttagagggggatgaatgatgtgggcagtggaatatagtgagaaagtgtaagtgtttttgggaaatagatgcattgaagttttgtaaggaaggcagcatagaatattggtaaggggtacagatcctggatccagactgggtacatgtgaattcaagccctttccacttattctgtgatcttgagcaagttatgaaacatctccatgactcagtttccttatctataaaatgggaataataatggttatctcataggatatagtgaggttaaaatgaattaatgaggccttagaactatgtaaatgttgaaaatataaattagtggaagattcaaatgggaaggtaggttgaggccagattgtatttccyaggagttcgattctttttctgtaggtgtttgggagacctctttgagcaggtaggtagcatagttaaattagtgagttgggaaaaacaacctggttgcaatgagcacagaaagacgggaggcaaagagcrcgttcagaagtgattggcagtagtttaggcttaaaattcaaagagcctgaattgggatggtgattatgaattaggaatggaaggacagatgctagtgatatttaatgaaggaagttggtaaccttttggatgtaatatatgtgtcaagaaggcaggggcaaagataattggcttttgcctatggcaaaatagtgatgataacataaatgtggagctcaggaagggagaaagacactggtttattgttcttgatgttgaaagttcagtaggagcagggggtgcttctggggaaagagataaggaattatttttgagttttaaattttggtataatattaatgtggaaatgcaccaagttagaaatacagggctgaagcttgtgagagaggtaaaagatgracatattaagtgccttttcaaaaatacgttatctctgggatgaacttttctctaacagaataatattgaggtccttctttacaagttttaagatcagattatatgatttttataaaggcaacatttaaaattgtacttagaaaataaggagatgcccaagaaatagactactgtattttcagtgctgaagtatataaacatatgcttgaatcactcttacattgagactctgttcatctatccatttatcatccagcctatcttagcacttctcagactgcaccataatttatccatattttctaatagattaaaagtctcttgaggatttatatgtgattcctgacagattcgactttttttcctcagggcctagtacttagtaagcattggataaatttacactgggtaaatacatatttattgagtatttaccttgtgtcacatgataggctaagtgcagaggataccaaaatgagtgaataatagcccccaagaagctcatggtctttgggtgattaagcatgtatttaatggaggccatgtggtaagtgcagtatttgttgaggacagtgtgactagtgtctgatagagtaatgaacacactgctatggcagaagagaggaagagggacttagtctgctgtggagaataatatcagggatggcctcccagagcaggtgaccctgagctgagacttgaaagatgaatagaagttaaacaggcagatgtgatgaagaaaggctctaaggcagagtggatatcaggtacaaacacatgaaaagtgtaagagaacatagtatatgtgaggaatcttgtgtagttcagtgtggctggaagtatagagtgtttatatgggacatagtaacaaaagacactgctggaatggttggtgtgacctacttctcacaaagagccctgcatgccaygctaaagatgtcagtgagccattgaagagtttttagtagaagggtgatttgcawgtgtakgaagatctcttttctgtagcartatggaggacakgttggggatggacatagatggatatgaaaaagtaatctgatcaggaggttgttgaaakaatctagccaaacaatgaggacaaatgcctgcagaaagtcatgggctttttggttagtgaaaaatgmatggatttgtgagagatgtttagaaggtaycagtgactgattgtttacagggatgcgggagagagacaagttgtatgactcccagattccaggcttgaattgaatgacttctgacatcacctacccagagtagggccaaacttcacaggttgagagcacagttttccacaagactgccctcacttcagacactagctacaaacttgggggtccccaggtcactcttatgaccagctggctacaaattcaggagttcccactaccctcttaggtttgataattctctagaatgactcacagaacttagggaagccttacagtcgagcccaggacgacataggcatgaacatcgtgggtccccttacacatggcttttcttctgcctctgctgccccagagacaacaagacagcccctccttttccttctcctccttagcctatccaaggtgaagacctttaaggtgatacacttccatttaatgaataataaatatattttctcataattttcttaataatgttttcttttttctagctttattgtaagaataccatatacaatacatatacaaaatatgtgtttacaatttttgttatcagcaagtcttcaaatcaataataggctattcaatgattttttttttttgggaatcaaacgttatatgcagatttttgacagtgtgggggattggtgccccaacccctgagttattcagggagcagctgtacttacgatgacagtgttattatagccaaaggatgtaaatcagaatcagccaaaaggagaaacttacagggcgagatctagaaggatgctgaaggtgacgcttctttcgccctctcttcctggagtcaggatgctttgctctcctggatgtgtgacaatatggagattgttgcatcacatggacatgtgatagtactgttatagtttggatatagtttggatatttgtcccaccaaatctcatgttgaaatttgattcttgatgtggtagtgttgggaggtggtgcctgatgggaggagtttgggccatgggggcagatccctcatgaatggcatggtgccagcctcatggtaatgagcaagttcttactctgttcattctcatgagaactggctgtttcccctttctcttgtttctgttcttgccatgtgagttctgcatgctgctggctccttttcaccttactctgtaagtggaagcagcatgaggccatcactagaagctgaatgggtgcaggcaccatgcttcccgtacagcctgcagaactgtgagccaaataaacctttttttctttaaaattacccagcctcaggtatttctttgtagcaacacaaatggactgagagaaatacacagaatattgccagttaaggaagctcacgtgatcaattgaatgattgcccatggttcttaatctcttgttctcttcctcttcccagaggttgagttgataccacatggctcaaagccccagctctctaatcacatggttggttttcctggcatggtcatcccccatcctgagtagtcttgttggcataaactatatagggggccaccatgagtcacctcattagcataaaatttcagggcctattgtgataacaacaataatcctgtcgctagggtaattccaaggatttagaggctattttccagggactggagacaaaggccagctaaattctttattatacagggtacagggaactgatattggaaatagagaaaggagcaggcttaaatagaaacaaaatgtgtttcagtaaatactcagcagctaattcaaaatagaggcctggagcttcagatagagtgtgagtgtaaaattgtgagatataaagggtggttgatgatctgggtatggatgagtttgttcaggagttttgtaaagggaaaggtttagaattgctttgggaatataaagggcagaggaaagaggagatctgaggcagtgaacatagccagagagcagaagtgtcaggaaaagagcagtgtcagggtttcaagaagaggggaatgaataccatgtatcagcagcatcaaaggtcagagagaagtgaaggaggtgcaactgaagagtgaccattaggttagtaaatgaagtatttttagtgaattggtgaagactaaagtcatgtggtagcttatgaggaagaaatagcataaaccattgaaggttggctgtgagaggaaggagaggtgaatagtagctagaggatttgtagagtcaagtgaaggaatttttttgtctcaattttatctgttttttaaacattttttgtgtttttgaattgatacataacagatgtacatacttttggggctcgtgataatttaatacattcacataatttgtaaagatccaatcagtataaatgggatatccaccacctttaacatttgtcttcatgctaagaacattcaaattattctcttctagttattttgaaatatacaagagactattgtaaactatggtcaccctactgatctatcaagctgtgctcattaatcagcctctcttaattctcccttgacccctacccttcccagcctctggtaaccaccagtctattctgtcttcatgagatcctttcttagctcccacaaatgaatgaaaacatgtgatatgtgtctttttgtgcttggtgtatttcatttgacataacgacctccacctccatccatgttgctataaatgacacgattttattctttttatggctgaatagtattccgttttgtatatataccacattttctttttccattcatccattgttgggcacttaggttgattttgtattttggctgttgtgaatagtgctgtgataaacacaggagtgcaaataattcttcgacatatcgatttcyttttttttttttgtatatattccyggtagtggaattgctggatcatatggtagatctgcttttagttttttgaggaacctccacacagttttccacagtggctcccaccaacagtataggagcattcccctttttccatacctgaccatcatctattattagctatctttttgatgaaagccattttaattggagcgagatgatctcattttggttttaacttgaatttctctaatgattagtgatgttgagcattttttcatgtatctattggacatttgtatgtcttcttttgagaaatgtctattttgaccttttgcccattttaaaattggattatttgtctttttgctattgagttgcttgagctgcttatgtgttcyggttactaatcccttgtcagatggatattttgcatatattttctcccattgtgggggtgtctctttgttgtttcctttgctgtgcagaagctttttagtttgatataatctatttatctgtttttgctttggttgcctgtgcttttgaggtcttacacaaaaaaaatctgcctggactgatgtcctgtagcatttccccagtgttttcttctagcagtttcatagtttgaggtttttaacctattttgattttatttttgtatatggtctttaatccattttgatgtttgtaaatggtgagagatcagcatctagtttcattcttctgcatatggctatccagtttttccagcaacatttattgaagagactgttctttccttaagggatttttgtaatgtggcagattaaagtatatttgtataccgaggggaaagagccagtagacaaagagatacaggaaagagagaaattaattaaaggagtaatgtcatgaggaggtgaagtttataaatatcgtacagtagctataaacagctgctaatgttagaaattaactcctataggaggtggccacattaatggcattacaggmtggccctctcagagagcatggaaaaaggcatcggagaaataagaactttgctctggttatgcctatagcatcaattggtcgttttcatggtttttaaaatctcaacctcatgcaaagttgagggctccctaacaaagcaaaaaaatatttttgtaaaactagtgtttcaaattttagtgattcctggttgatctgtgttaaaattctatagctagaaaagcatttggacagtttctgaatttggagtttatgaaactttgacatacacatagttttcaaagcctaaatccccagaagcttgtcaaaccaaagtagcaattggatcagaattcctcttaaggaatcaccaggtattatgcaaaaaatttagtgtgagctatgtatttaaactctattaaaaattctggaagaaaataattatttaagaacccattagtttttaagactagagagttggattctttgaataatttttattcttcactgatttctttttatagaatacttttatgtttgttttcaaaactaagaagtaactgaagtttagtttttattctgtactggttctttcatcactattactattttatataagctaacgcattaaaatgatacaaatcttgctaatttgattatgtttgaattaccactggattttttactgttaaccttattaactcataaatgggtctttattttttactgaaagctgtrtattataaatgcactgtggaagataggttctgtcccttatagagggtaaagaatgtgtaattckgccacatgtgatagaaaatgtcttatttttattatgtgtaaacagaacagttgcttttaagyagtgctgaatattatatgtatatgtcatatgctaggttcaggaaactgagattatatctaaatatatgagaaacttgtttgttgtctagtctttttgttaggttatctctgactrcctctggcttgagacattttgtgaaatttcttcattttttctagctataaaataatactcttactaaatgcatcatgattttactgtgacaattttgagtttatcttttgatggaaaaatctcaatgtacattaatagctgatgataatttataaaaaaattttttaatctgataaatcatttaattygtcttttgaaatttcagggtgtactgatggttggacccccaggcactggtaaaactatgctagctaaagctgttgccactgaatgtggtacaacattcttcaacgtttcgtcttctacactgacatctaaatacagaggtgaatctgagaagttagttcgtctgttgtttgagatggtgagtgacgatatattcagatttcaaagtagtgtgtgtaggcctatgatgcccccataaatcagttctgtccacctggaatcttttttgaaaagggcagtgtagttctattttaatagttcttgacacactgatgagaattgggrtgatgggttttgtggggtagttggtgtatcttcagtgtwtctttttctttaaggtaaagcaaggccttttggcatcctgtccactcagggtggaagaagagactttggtcgtatatgtgggttgactggtatttctggatctctagggagctgatsgaacagaagaatattttcatatgtattttaaaaatcagagtctgacccgtcattraagtttattcctttttcatatgggatttgcagtaacttaagaatgtatatttgaggattgaggttgatttatttttgaaaaatttttccattatggaaatttccagatatgaaagtagaaagcatagtacaatgaacccctatgtatctatcacccagcttcaccagccatataacctttatttttagaaatttcttttttctcatgggaatgattgatttagcctttgccataaccagatgatggcattaaaacagtgagaagtttctgctctcttttgccattgttttaaaagayttttttaaatactccaattgttttatgagattattgaatgatttctttaaaatattttcataaaggctagattttatkcccctaccacgatcttcattgatgagatagattctatctgcagtcgaagaggaacctctgatgaacatgaggcaagtcgcagggtcaagtctgaactgctcattcagatggatggtaattgatatttaattattgtttcaaaactctcatttttaaatattttgtgtaaactcataatcaatggatggattagaaggcagcctgagtttaattatttgttcattcacccatttatttgttcatttgttcatgcactcagaaagcatttcttgcatacttgttagagatcatgcaccatttcagattctgaggttacaaagaaaaaggctactatggccttcaaggagcttactgtttggagcaaagtttctggaggcatgatctagagtcctagggatctttgagaccctttaaagaatctgcaaggtcaaaactattttcataggaatatcaagtcattgtttgccttttctttttcactctcattctctcacaagtgtacagtagagttttcgagaggctgtaagacgtagggtatcataaaaagaaagcagaagcagatatgagaatccagcttttctctagatagacattaaagagatttgcaaaaatgttaaaaaaaaaaaaaaaagcccctcttcttttttttaatattttggaaaacatacttttcataaacatatgtaaataagtaatgaatttatcattatttttaagtgaattaatatttttaaatttcaattttaggttttttccatacaatttacccatgcaccatctattttaagttttaaagatattgatagatacactccacacacaaaaaagctctttggggttctcaataattttttttgtttaaggttcagagtcttgctgtgttgtccaggctggagtacagtggtgtgaacacagctcactgcagccttgacctcctgggctcaagcaatcctcctgcctcagcctcctaagtagctgggaccacaggcacatgccaccacatctggctaagttttattttttgtaaagacagggtctctccatgtttcccaggctgtagttgaactcttgagctgagatgatcctctggactcagcctctcaaagtgctaggattatagacatgagccactgcacccagcctcagtaatttttaagagtataaaagggtcctgagatcaaaaagtttgagaaccactgatctggatgggaagcaggcaactgatcagatgagtataatacattatggtacattctggcgtagaagtaaagtctgggtgcagtggaaaacacaggagaggcaccaccaagaccaggggagtcatggaaagagatagccaagttggactttgaagcattgataggagttatcaggacagagaaaaagggccctgaggagccatagaaggaaaagggttatgggctcagagctgctgtttagagataagttagctgtgtggtagacaagaggccgttcaagcaaaacattagaacagataaaatacattaaaaaatatccagggtgagggactgagtgcaatggctcatgcctgtagtcccagcactttgggaggctgaggtaggaggatcacttgaggccaggagttcaaaaccagcctggttaacatagcaagactttaacgtagcaaaaactttaaaaagtagctggatgtggtggcatgtgcctgtagtcccagctactcaggaggctgaggtgggaggatagcttgagcgcaggagtttgaggccacagcgagctgtaattgtgccatggcactccagcctgggcaacagggcaagaacctgtctcataacaacaacaacaacaaaacaccaacaatatccaagttgtgttgtttcaaaacagtcacggttattcatcaactgtggatacttactgaatacttacaatgtactatgagacccttccctcagtgagtttaccatgttaacttttgctaaagtatgagagaaaggaatgagtatgttttatttttgaagtggggtataggagaaaacattaggtgtttaaaattggaaaaggaaatcactgaatacaaatttagtcagctgaatttcattgagggatatttgtgactattgttgattattagttggacagcttgattctttgtcataatgaccgaagtaggagtttcataataagaaaatattatatgtttcagtgagctgagatcatgccagagcactccagcctgaacaacagaaccagaccttgtttttttaaaaaatactgtattgaactaggttgctttaagtccactagcactttattatgctagactagaaagtcttatcaataaagtttatggggtttttttatcttttatttctcactacatattttctaaagtttctgttgtgtgacctgaaattttttattctaaaattttaattctgaaaaggagacactgtgtatrtacatgtagttggtttggttatttttatctgtgattactgggttcattcttaaatgtcttatttattttttacaggtcacttaaaagtttaaaggacaacatcatggaaatataacctgtctttcaaaattataattgcatgctagaatattaagtaaatgtgaaccctctgttttcacttcttgagaaaatagattaaaaactaaaataaaatttttgcggaactttatgatttaaaagaaataagaggaataaaacagagcctaatctcccataccttttcttttaggaggaaaatacattcattttcttacagaaaaatggatgtttttattggattaaaatcctgcactaggttgcacaagaaaaaaaaaagaaagaaaaaaaaaatcccacactaggttatgtgaattcttctacttctttgttttgtagttatctgttagtgtgtctggttttgccaccacacagaggtcaggactgcactttctttatcgttgattctgccactttggctaaaagaaatgttaattgaatgaaagaataaagagttgtaagaaaaacactatcttttcctcccttactgtgtataggagttggaggagctttagaaaatgatgatccttccaaaatggttatggtattggctgctactaatttcccgtgggacattgatgaagctttgcgaagaaggttagaaaaaaggatatatatacctctcccaacaggtatgatgtcttctctattttgagctttctgttactttttgttacctttcccatgtatstaaatctttattccattgccattctgcttaaagaagtttatagcatcacaaaattaatttgtagtagatgtgaacacaggccacagtactctattgaaatttcttatgtttcagagaaattcttaartttggaacaatattcatcttaataaatatggtagcacttttaagttttcacttttcaacttgaagtttttttggatctttttcagaatatgctgttttggagagagagagagagtgtgtgtgtgtgtgtacacatatttatttatttattttgtgacacagtcttattctgttgcccaggctggagtgcagaggcatgatctcaggtcactgcaacctccacctcctaagttcaagtgattcttgtgccttagccttycaaatagctgggattacaggtgtgtaccaccacacccagctaattttggtgtttttagtagagacagggttttgccatgttgtctaggctggtcttgaactcctggcttcaagtgatttcccgcctcggcctcataaagtgctgggattaccggtgtgaaccaccacgcccagcctggaaaatatagtttcatcctgttaataaatgctgaaatatccatgaatgaatgttttctttttattttgaggtaaaatttacatacaatgaaatgtacttaagtatataatttgatgagtacaaatctgtacacctgtttaatcaataccctaatcaagatgtagggcatttctatcatcctgtaaagttctgtgtgcccctaccagctaatcctccaataggcattcactgtacgtgatttttatcaccatagattagttctttctcttgttaaacttcatataaatggaatcgtgactgcatgtactcactgtgtctggctactttcacttgaggttcatccatgtgatcacatgtatcagcagcttattcctggtatgattataccacaatttgtttattctccttttgattggtatttaagttattcctagttttttggctattatgaataaagctgtaaactttctggtacgtatcttttttatggatgaatgttttcaattcttttggataatataagaaaagaaaagatgggtcatagggtaggcatatgtttagcttttataggaaatacccaaactgtttttcagaatggtcataccattttgtattccatcatcaataaatgagaatkcaaatacttccatatccttgccaacatgtggtgttgtcactattttaatttcagtcattctagtaagtatgaaatgctgtctcatgattttaattggtatttctctgatgacttacgttgagtacctttttatgtgctttttatggtcatggtatactttttgtatagtgtcatttctttttcccagtttttaattggattatttgttgttttattaatgctttttatgttattagatctgtgcattgtgcatattttcttccagtttgtagtttgccttttgattttctttatggtatctcttaataagcagacattttaaattttgatgaagtcctgttgacaattttttttaatgaatagtactttttgtgtcttaagaaatcttgtctatcccaaagctgcaaagtttttctcctgttttcttttggaaactgtatttatatctgtgattcctcttgaatgaatttgtgtgtgtgtgtgtgtgtgtgtgtgtgtgtgtgtgtgtagatgagtcatttttttcatatgtatatgcagttgtatcatcacttactgaaaggagttttcttttttcattgaattacttcggcaccttcattgaaaattattttgttgtgtatgtgtgggtctatttctgaatactattctgttccattgtattttaaatacacacacatatggttatctaagttatttgtttttttcttgagcaagctttggtaacttgtgcctttcaaataatttgtctattttttttataagttgtcagatttgtttggatttgacctaatgtgaatgtggaagctgattaaatagttatgggagattgtggaagctgattatatagttcatgtctggttctggaacttgaagtcagtaaggagggcacttaggaagagatgatgaatgtgaagtggtagaagtaaggacaaactctacctgtgggggtggaatccatgaggatacattggaatctatgttgaactctttttttccactgagactcctaaccttgatgartggactttcctacagaagaagctagctaaatgtatacctggctcaaaagtcaaaaaaggtgaaggaagaaatgtggcagaaactaccaagagctgaaggtggaagtgctgccccacactaataaggagaaccaagaaataagtgacagtatgtgccagctttctgagatgattaatttttgcctttcacatctcagacatgactcatgtggtccacactaacccagagctatgcaataaagagaattctgggaaatgaaattccagcttcacttaagttggcataatacaaatctacacaccttattttccttttattggccataggatctgtagtgatggctcatttttcattcctaatattagtaatttatctctattcttcatcatttttggttgaaatttatcaatattgttaatcttttcaaataaccaaatttttgctttgttaattttctactttstatttcaatgatttcttctctgttaaaaaaattttttttttgctttacactttgagtataattttttctatctgaagttagaaactaaggttattggttttaggaaccacccttccccacttttttttttttttaagagacagagtcttgctctgttacccaggctggagttcagtggcatgatcttagctcactgcagcctcaaacttttgggatcaacagatcctcccacctcagcctcttgagtagggactacaaacacatgtcactgtgcctggctaatttttttatttttattttttgtagagacagaggcttgccgtgtttcccaggctggtctcaaactcctggcctcaagcaatcctcccagtagcactgggattacagatgtgagctactgcacctggcctttttttcttttttaaatttgcacattttaaagctataaatttctcattaagtactgctttgcttttatctcacaaattttgctatatcatattttttctactattaagttagaactgttttctaattttccttttttatcccctttctttggtcctttagttatttagcatttaaattggtttgggagccaaataattggggtgttttctagatatcttattgttgatttttactttaattcattgcagttaggaacatactctgtaagatgtcaatttttgaacttcttgagatttgtgattcagcatatagtctgtcttggtgaatgctccagatgcaattgaatagaatgtttattctgagcttgttataacattctataaatgtcagctagatgaagttggtgtgttagtattattcaaataataagatccttgctgattttttagtctagtttttctgtcagttactgagagtggcttatggaaatcttcatctatgactgggaacttgttcatttctccctttcgttttttcagtttctgctttatgttttgcttcatgtgttttgatgttctgttgttaagtaaataaattatcattgttacatcttctcggtcctattaccattatgcaaygcctctgtatctctgagaatacactttgacttggtatctgctttgactgcttttaatttagccttaccgtctttcttttcctattgttgttgtgctatatctgctttttatctttaatttttaccctaccctgtctttatatttacggtgcagtttttttttttttttttttttttttgagatggagtctcgctctgtcaccctggctggagtgcagtggcaggatctgggctcactgcaagctctgcctcccaggttcacaccattctcctgcctcagcctcccgagtagctgggaccacaggcgcctgccaccattcccggctaattttttgtatttttagtagtagagacggagtttcaccgtgttagccaggatggtctcgatctcctgaccttgtgatccgcccgccttggcctcccraagtgctgggattacaggtgtgtacagtgcagtttttatagayagcatatagttgagccttgctatttgtccagtctgtatctcttttttgtttgtttgtttaagtcggagcctcactctgttgcccaggcgggagtgcagtggcgcgatctgggcttactgcaacctctgcctcccaggttcaagtgattctgctgcctcagcctcctgagtagctgggactacaggcatrtgccactatgcctggctaatttttttatattattagtagagacggggtttcgccatgttgtccaggctggtcttgaactcctgagctcaggtgattcacccaccttggcctcccaaagtgctgagattaygggcatgagccactgcacctggctgtctctgctttttaataggagtatttagtccatttaaatttaatgtaattggtgatatgactgtgtttaagtctgccatcttgctatttgtactgtttgtttctctgtamcccccttgctaatttcttttgggctaattgactgtttttactattcattttaatgccattattggatttttagctatacctgactatatttattttagcagttgctctagcaattacagtatgcatcgtgccagccatgtgagagctacccttggatgactgtagttctggtccatgtattaactgtgacttcctgcgagaccttgtattagtcagagtcctgcagagaaacagaaccaacaggatgtgtatatataaagaggtttattttaggcagttggctcacacsattatgggggctggtaagtccaaaatctgtacactgagctggcaggttagaggcccaggaagagctgatactgcagttcaggtccaaaggctatcaggctggagacccagggagagccagtgttgcagttgaaatctgaaggccatttgctgaatttcttcttcccagtgtgggcggtgggggcagtgtcgcggttcagtgttgtgttttattcagaccttccattggttagatgaggcccacccacattaggaagggcaatctgctttactyaaagtccaccaatttaaatgttaatctcattgaaaaacatgttcacagacacattcagaataatttttctttttcttttttctttctgagatggagtttcactcttgttgcccgggctggagggcaatggcgcaatcttacctcactgcaacctccgcctyctgggttcaagggattctcctgcctcaggctcccaagtagctgggattacaggtgtgtgccactgcacctggctaattttatacttttaatagagacagggtttcctcatgttggtcaggctggtcttgaactgctgacctcaagtgatccaccagcctccacctctcaaagtgctgggattacaaacatgagccactgtgccagtcccagaataattttttatccactgtttgggcaccattgcccagccaagttgacgtataaaattaaccatcacagaccccaagctggaactttctagctacgccactcttaaattcttggcacacagaaactttgaggataataaatagttatgtaaagtctgtaagttttagtaaaattttttattcagaaatggataatctaccactttatagtttttgtcagctaattttagcaattgaatcatttgtttttgttagctactttttaattctcttcagtgtgggccatatttttctgcttcttcacatatccaataattttactgtatgtgctacattgtagggattacagattatgtattttcctttaaatagtgatctggcaggcattcagattactggcagaactaagaaaaatcagtattcagttcttcactgcctgttggccaatacatgcaaacagttttctttatattctgtctcattttgtagttgtttaccatagggggcaagtttggtaacagttatttcatcatggctagaagtggaaacctcacctacaaattttgaaacttaatttttgtaacatattccttgatcacttttttgactagaccccaaggcttgtataacataattacttgatagattttttagctcacagattccatcttatattatcttttctggctgttactctgtattctaataatttaataatgtcattacttaaaaagaaaacttttctttttcttaaaatagtgctttatttcgctgggtgttgttgctcacgcctgtaatcccagcactctgggaggccaatgtgggcagatcacctgaggtcaggagtttgagaccagcctgaccgatatgagaaaccctgtctctattaaacatacaaaagttagccagacgtggtagcaggtgcctgtaattccagctactcaggcggctgaggcaggagaatcaacttgaacccacgaggtggaggttgcagtcagccgagatcacaccacagcactccagcctgggtgacagagtgagactccatctcaaaaaaaaacaaaaaacaagaaaaagaatttactgattgagctcataaaataatacgcttatttaaagcaacaacagaagcaattagatttagaacctataagccatgctggaatattgcaactctgagaattaactccttaatacctggctcatacacaagttgaaattcgagcgtttttttccttatttgtgattttaaaagtttcttcccattctttttctcttcatccatgtttttgtttgtttgtttttttgagatggagtcttgctctgttgcccaggttggggtgcagtggcgtggtttcggctcactgcaatctccacctcccgcattcaagcaattctcctgcctcagcctcccaagtagccaggattacaggcacacgaccccacacccagctaactttggtatttttagtagagacggggtttcaccatgttggccaggctggtctccaactcctgacctcaagtgatccacctgcatccacctcccaaagtgttgggattacaagcataagccactgtgcccagcccatgttttgttttctaaacaaaatatgtgtatgatatctaatatatttgaaagtttaattttactaccatattacagtgattataaataaaaattgataccagtggagggaataaaatttttgctgctcgaactgtcagtcacattattcaaacttttgttttttgaactttaattcttcactataataaagggagaaaaacataagtagaaaataattgatgacagcaagtttctgaactgctaaggaaagcttaggtattaggggaaagacatactttatattggtataaaggtaggaactccatttcctttggaattatagaagaagaaaataaacacggctaagaggcttccttctaaacttgtttttctttatgaaaagtttgtaacagtaattactttggggtgcttctctttgtttattgtggatctgaaggtgtgtaccttatgatcatgaaacctgggaaatgctttttccccaaggggctcccaaaccaataattataattagaactccattctttttcttttatctatattaattcatcaacaagtgttcatttagctctttgctatatgaaagacatttgttaggaactgtgggaatataaataatgttcattccttgttgttaaagaactgctttggaagccagacatatacttaccctaactgcagtaaaacagtggaatgcatgagccgagagctctgcacagtatttttggaacggacagggaggaatcccaaattctgactggtgtacttaagggagacttcatggaggaagttgcattttaactgaattttcatagagaaaagtagaatcgaagccatgggtgcttgaaaatgaatagatagataggttttggggctggagccaccagataggataaaaaggcctggaagagattgaacaataaataaaatttaagaagatgagagatctgaaaagaatgattttggaaatccagggtaaaattaatggaaataaaagtaaaatgtattaaaatttaaaaaaattggacattttatgaacaaaaccaactgtgaataagaatttttatttgaaaaaggcaaagattataagaaacaggatagatgaaatcagaaagccatctaatgtaattagatgtaatgcctctttatataatttccataaagaaatacccatatttatttaagaattagaaattggtggtaagaaaagccaatatatcacttactyttgcagtttaacaaaccactccaaaatttaatgagacaaaataattgtattattctcacattggatggggcacagtggagatggtttgtgtctgttccatgatgccttgggtcgtggttgggggtgactccacagctggggcctgggatcctgtggaatgtcttcattcacaagcctagatctctgctgggccatgttacctgtggccttgggatatttggatctcatagatggtagcttagtgctccaaatgtgattgttccactggataaggtggaaatggcatcgaattttatgaattacccttggaggttatgtaatgtcccttctgctcatacttctgacattctcaggcccacaccaattcaagggkaggggaattagactgcctctggtttggggagtggtaggatcacattgtagaaatgggtgtgggatgagagagaactgttactgctgtcttggtaaatacaatttgctgtagtcaacagaaggcaaaataataggcacaagtgagttctaatgttcttaccttaaggctcttttcattttaagcatctaaattatggcagcaactacctgttgagcccartgtactcctttctcaacctctcttcatttagttctgttttgcttttaggctgacctcctaaacaccaaggtattatagtcctttcaactcggggtgactctgacttcctattacatcagggtcaggtcctttatatatatatatatatatatawattccttttactgcaagttcacatcttatgtatcctatctgtgtctatttgcatctatcagtattttattgtatttttctacttacctttttcccccattctgctgcacgcatgcttcttcctacttctgtgttgttatctgtggtactcccatttcccaggttctctcttcccttctctttaaattttactgatttttcaaagccgacgttacagcatgtggacatcacgcagtcttctcgccctggcctgtctcgtgtccccaggtgtttcatctgggttggtgatttcccagatgtccctcaggaaaaggacacttctgtctccccagagtcctgtttgttgactgactggtggtgggggctgtgaacatttattgagtatttaccatgggccaggctttgcatgcatcaactcacctaaccgtcatgacagctttataaggtagattctgttcttattttacttaggaaacttgaggacccagaggctaagtgagagcaggcatgtgagtccagagcccagataggcaggcccagaatgtagttgttgtctcctgtactggactgcctggtatattcaagaggagttgtataaggagtgtatgattcctctaacaacatttatttaaatttagaatgtgtgttaattttgtgatacaggattggcagtttgttacactatgattaacaacacattaatcccttgttaaatcttttcacaagcttattgaatatcaattcagtttttgtttgagatggagtcttgctctgttgcccaggctggagtgcagtggcgcgatctcagctcactgcaagctccgccccctgagttcacgccattctcctgcctccccctcccgagtagctgggattacagttgtccgccaccacgcctggctaattttttttgtatttttagtagacacagggtttcaccgtgttagccgggatggtctcgatctcctgacctcatgatcctcccgcctcggcctcccaaagtgctgggattacaggcgtgagccgccgcgcctggccatcaactcagttttatggagctggtaaatcttaagaatattctaaaaaattactgacataaccagttttaagttacttgttccccacccccccgccaccaatcatagttactagggaaacagaatatgctttctgctaagcttcagtaccactaggtcctcacttacgaacaggtttatgtatgttcattttaagttggctgtctggaactttgtttcagtgggagaatatattaaactttgtgttaaggaacttaggccaggcacagtgaaacgtttgatttacacatacagtggtattctaatattgggtctgtaagaatgaaaaggggtatttgttcattgtcattcactggctctatgtggaacattgtgtaatgatgctcttatgttaacatcagttcttacctggacatcaggcgcacatcagccttctgtatcggtaggcacaggagcttcctcccctcacccctttctctccctacccctcctgccaccagcctgactggaggacttctttggctctaaaccacatgtcgagcaggtgtactccctgcgagcctgttggctgggatcaaggatgggggctcctgggattagggaactgtggaggtasacgttttccagtcctgccctttctgttttctggtaatcccaaatcacacctgcttgctgcttttggcactgctctgcttggtctcactgtgtgtttgtggtgtgtgaaacataactcaatacagaaacagttcctaaaatgtttagtttatccagtagctggtgaagcagacagccctgttacccgctccaggagaagtggagcctccctggaactcagcagctcccagcgtgttccctcccagcatggttccttcctgccctctgctgggggtcaccacctttcccttacagtgatttccttttatggagataatgtattgcttttccatataatttcatcacctaacaatgtatccccaagcaaagttttacctccttttaaactttacataaatgaaatcatactgattgtgttcatttgtatcttgcctcttttgctcaatgtattttaagatttatccatgttaccacatatatataccacatataaggctgccacctcacattcatttttgttactgtgtggtattctgtcatattcgtttgctagggctaccataacaaatatcaaagattgggtggcttaaacaacagaagttaattttcttttttttaaaattttattattattatactttaagttttagggtacatgtgcacaatgggcaggttagttacatatgtatacatgtgccatgctggtgtgctgcacccattaactcgtcatttagcattaggtgtatcttctaatgctatccctccccactccccccaccccacaacagtccccagagtgtgatgttccccttcctgtgtccatgtgttctcattgttcaattcccacctatgagtgagaacatgcrgtgtttggttttttgttcttgtgatagtttactgagaatgatgatttctagtttcatccatgtccctacaaaggacatgaactcatcattttttatggctgcatagtattccatggtgtatatgtgccacattttctttatccacattatcattgttggacatttgggttggttccaagtctttgctattgtgaataatgccacaataaacatacgtgtgcatgtgtctttatagcagcatgatttatagtcctttgggtatatayccastaatgggatggctgggtcaaatggtatttgtagttgtatatccctgaggaatcaccacactgacttccacaatggttgaactagtttacggtcccatcaacagtgtaaaagtgttcctatttctccacatcctctccagcacctgttgtttcctgactttttaatgattgccattctaactggtgtgagatggtatctcattgtggttttgatttgcatttctctgatggccagtgatgatgagcatttttttcatgtgttttttggctgcataaatgtcttcttttgagaagtgtctgttcatgtccttcgcccacttkttgatggggttgtttgtttttttcttgtaaatttgtttgagttcattgtagattctggatattagccctttgtcagatgagtaggttgtgaaaattttctcccattttgtaggttgcctcttttctctgatggtagtttcttttgctgtgcagaagctctttagtttaattagatcccatttgtcaattttgkcttttgttgccattgcttttggtgttttagacrtgaagtccttgcccatgcctatgtcctgaatggtaatgcctaggttttcttctagggtttttatggttttaggtctaacgtttaagtctttaatccatcttgaattaatttttgtataaggtgtaaggaagggatccagtttcagctttctacatatggctagcmagttttcccagcaccatttattaaatagggaatsctttccccattgcttgtttttctgaggtttgtcaaagatcagatagttgtagataygcggcattatttctgaggactctgttctgttccattgatctatatctctgttctggtaccagtaccatgctgttttggttactgtagccttgtagtatagtttgaagtcaggtagcttgatgcctccagctttgttcttttggcttaggattgacttggcgacgtgggctcttttttggttccatatgaactttaaagtagttttttccaattctgtgaagaaagtcattggtagcttgatggggatggcattaaatctataaattaccttgggcagtatggccattttcacgatattgattcttcctacccatgagcatggaatgttcttccatttctttgtatcctcttttatttcattgaggagtggtttgtagttcttcttgaagaggtccttcatgtcccttgtaagttggattcctaggtattttattctctttgaagcaattgtgaatgggagttcactcatgatttggctctgtttgtctgttattggtgtataagaatgcttgtgatttttgtacattgattttgtatcctgagactttgctgaagttgcttatcagcttaaggagattttgggctgagacgatggggttttctagatatacagtcatgtcatctgcaaacagggacaatttgacttcctcttttcctaattgaataccctttatttccttctcctgcctaattgccctggccagaacttccaacactatgttgaataggagtggtgagagagggcatccctgtcttgtgcccgttttcaaagggaatgcttccagtttttgcccattcaatatgatattggctgtgagtttgtcataggtagctcttattattttgagatacgtcccatcaatacctaatttattgagagtttttagcatgaagggttgttgaattttgtcaaaggccttttctgcatctattgagataatcatgtggtttttgtctatggttctgtttatatgctggattacatttattgatttgtgtatgttgaaccagccttgcatcccagggttgaagcccatttgatcatggtggataagcttttagatgtgctgctggattcggtttgccagtattttattgaggatttttgcatcaatgttcatcaaggatattggtctaaaattctcttttttgggtgtgtctctgcccggctttggtatcaggatgatgctggcctcataaaatgagttagggaggattccctctttttctrttgattggaatagtttcagaaggaatggtaccagttcctccttgtacctctggtggaattcggctatgaatccatctggtcctggactctttttggttggtaagctattgattattgccacaatttcagctcctgttattggtctattcagagattcaacttcttcctggtttagtcttgggagggtgtatgtgtcgaggaatttatccatttcttctagattttctagtttatttgcgtagaggtgtttgtagtattctctgatggtagtttgtattttctcatagtaccggaagctagaagtacaagacyaaggtgtaggcagggtggttgcactctggggcctctctccttggcctataggtggccatcttgtcccggcgtcttcatgtggtcttccccttaggggtttttgtgtcctaaccgcttcttcttataaggacaccagtcatgttsgattagagcccacccatatgacctcattttaccttaattacctctcctgtctctaaatacagtcacattctgaagtactgggggttaggagttgcctaaaaattttgagggacatggtttaacccataccatctattatgtgattatatcaaaatgtatccatcatattgtttggtggacattttaattatttcttgttttaggctattatgaacagtgctactgtgaacattttcatacatgtatagtggtaagaatgccagaatggagcattccatcctaggagtgaattgctaggtagtgccgcacagctgcagtattaatagatgaattcaatatgttttccaaagtgcttgtgttgcaggatccttggtggcacctttgctggagttttgcttgagcccagcgttctgaccactgggcctggcaggctgagctcggctggagctactggccctgatcccacgccggccaagggcaagccaggcacagagtggtgaggggtgcatgagcaagcaagcaccagggtccggccactgtgcattgccaggcacgctggctattgggtagtctgactttttcttgctgatttttaraaattccttaaatattcttgatacaagtctttggttgcttatatatgttacaaatatcttctcaaactctgtaacttatctgttttcactgtgtcgacartatcttttgatgaatagaagttcctcattttaatgtggtcagtttatcaatcttttccttgttgattttttttgaatatatgtcttgagaatacttccctgaggtcattgagatattcttctctgttataaaatacttacaactttgcatttagatgtaatatatctggcactgatttttgtgcacagtatgatgtaggacctgatttcatttttttccctgtggatagtcagctgttcttacatcattaattgaaaagacactccttcccctcacggcctgaaccacctctgtcataaattcagtgtctgtaattatgcttcggtctgctgctgggcaccccgttctgtactattgatctatttgtctatttccacaagagggtcacactgctttgagtcctatacctttgtagtaagtcttaaaatctgatagagcatttctttccactttgctgttgctcttccagagcatcttggctgttcttggttctttccatttctgtgaacattttggtatctgcccgttagtttttacagatagaccttttaggaggatctttattggaatgctttggctgtataagatcaattgggggagaattgtcaatttcatgaaagacaaaacaaaatgaaccaaaaagtaaacactggggaactgttttagatgaaagaaggtgaatgagacatagtaactgactgcaatgtgttatggtttgtaaaagttataaaggcttgggacaaatagggaaactttgctttgaattgtgtattagacactaatattccagtattaaatctcctgataagggtgagaaatgctatgtctaccttttttcttaggagatacatgctggggaatttaaggtgaagtgttgtgatgcctgcagctagcgctcaattcaaaaagttgagggaggagagatgacgagccagctagagtgataatggcaaaatgttagcaattggtgaatctcagtgaaagggaaatgggtattcattgattttcttttcctgtatatatggcatttttcaaaataaaagtagaagaaaattaaatttcattttgtatctcaggaaatagtagagcgccagataaactagtaatgcattatcttagtgtgctgtgctaagcagatttgccactaaaagcactagtgaaatggcaagcatgattggttattttaaaaattctctagtatgtttgaacttattcagttcacatttaaatcatactggaacagcaaatgtctgtgggctggctctccaagtaaaaaatacattaatragctttttgtgccaattactgattttcaggaaatgttctttaaactactgataagagttctggagatccatgtcatactaacaggtgagcaaagtaattcataggagttacacttgatgcagtgtaattttgtaacaccaggctaagtattttttttttgagaagcatttccggtgcttgaaaactgatatttatatttttcatgaagaatctcagattctttgttctcatagtaggtatcttcacagtctttaaagaaaacctaggtggtttttggtgtttttttttttttttttttcaatttttagttactgcaacagaggcacataggaatttaaatgattccatgagtcatgcagtgaattggtaataatactaatggacacacagttattgactcttctttgcattggcctcatttttcccccaaatgttaatatgtcatttctcagcaaaattatttgtaaagtaaaacatctaacaacamcaccaaaatcttgtaacagcaaaaggaagagcygagcttctgaagatcaaccttcgtgaggtcgaattagatcctgatattcaactggaagatatagccgagaagattgagggctattctggtgctgacatcactaatgtttgcaggtatttttttaatgayctgtgattttagacatyagttatagacttcgcaggaggactggtcttaaagtcaatgtagttagcccagtgtagttagacatgaaagcagctacccatttctttraaatggtttcccatttgtccctttttttttacatataactttatttttcattgtgagatgaaaattatatagcagtggtcgttgatgtttttgatctttggatttttaagaaattgttgtgtcggtggcttacgcctctaatcccagcactttgggaggccgaggcgggtggatcacgaggtcaggagatcgagaccatcctggctaacacggtgaaaccccgcctctactaaaaaatacaaaaaattagccaggtgtggtggcggacacctgtagttccagctactcgggaggctgaggcaggagaatggcatgaacccgggaggtggagcttgcagtgagctgagatcgcgccactgcactccaacctgggcaacagagcgagactctgtctcaaaaaagaaaaaaaaagaaattattgtgtctaactcgataataatgactttgacaacctaagattagtttagctttgtgttggagcctttctgcatcaacctaaagtaatattatttagtttttgttggcattatttaaacacatgcaaatgagcaaaaatgatcagcgtaagctggggaagatacacgtttaaaattttttcagtttagcgacatcataagttttagacagttcctgtcactgcagttattttttttcttatttttctaactgcacttaaattgactttagtagcctttctttaaagccacagcatctgtttttctcaccttttctgctcgcatttttcccatgtgcatccaagtttagtggcatacaataaggttgcaatagttcctactgctactatagcaaaatatttaagaacttgacatttttgttggcttggccttcctaatagcttttttgtgattatgaattatcsttttcttccagaccttcatatttatttatagttggtcaaagagagctgcacatgggatcaagagaagccagagtttatgccttcagttgcctacaaatactccatgtagggaattccatgtccactatatgtggatattcatgtttcagagggagtgattcgtgtctttattcctctatttaggctgtagacaaactggtctgtggtttgaattatcttaacattagccatatgttcatttccaagtgtacaattcagtatttcaaaatttgacttcagtttcctaaacttcttggctgtctttgaggagcaagtggagaaaagaaaattcagtactattcgagcttwacttagacttttagggttcgttaactatacatttcatgtttttggttgtttgcatcctgtcttaacttctgctgaacycccaggatgtttcttaagtggaaaattctaagaagcctcataaaaacatataaaataatcttttgatttttttttcataactttgttacaattgaaagtgtttaaaacatgtgcaaaaattactgttgactgattttggtatatttttagggatgcctctttaatggcaatgagacggcgtatcaatggcttaagtccagaagaaatccgtgcactttctaaagaggaacttcagatgcctgttaccaaaggagactttgaattggccctaaagaaaattgctaagtctgtctctgctgcagacttggagaagtatgaaaaatggatggttgaatttggatctgcttgaatttctgtcagctctttaatttctggtatttttgttgataaaatacgaagaaattcctgcaatttttaaaaaacaagtttggaatttttttcagtggagtggttttcgcttaaaggaaaaaaaaatctaaaactgcgaagaatactaaatgtagttgagaaataattgatggcgagagtttgctagtctccctccccggctttgtgctggtattccacgtattcctgcattaatattgcacacccaaaccagtctatcagggaggctgaagcaagggcgcagtgtgatattttaggaatacagaagatttagaaatacccctatttctcatttgcagtttttttttccaattctgtgctctgtcaacatgagggacctatctatgtatgttgacttttaacatcaaaattggatttgtgtcaaacattcattgttaagagaagaatgacagtatattttggaggaaataatgaatttactaattaaacctttagaatttatgacttactgttagagtctgtcatatggttagaatttttacttccgctacccctgccatttcttctgctagctacttcataatatcttgagctttactgaggaatattctcacgctctgtggtatttgaatcattttgccaggtcatttctctgtctttagtattttttgctggtgcttcttacatttaatatggaaaggtgggaagaatattactgcattagatgtaattcttcattctagacttccaagtttgttttcacttttttgtgtgtgcgtgaaggagtctgtgtcacccaggctgtgtagtgcagtggttgatcttggctcactgcaacctctgcctcctagattcaagcaattctcctgtctcagcctcccaagtagctgggattacaggtgcgcaccaccatgcctggctgtgttttcacttttctttcaacatgttcaaccagatatatagccattatttttctcagctccagcattgtttgatttttcttgagtttgattttagtatttgagataaatacttttacattctaaacaagtccactctctgtggctaacgcaaaacaaatgaaatctttattgttttccaaacagctagtttaacaaaacagcatcatacatagtgaatgatgttcattggaaaattctaaaatttgtccttgtctaggttgagaacttttacacacactaagataaagatagaaatctgacatgctcactcaattcagcaggaattacacattagaaagaagccagaaaaataaatggcatatatccaatcacaagtaaatgatcctggcgttagtttttatgattacatgtgtctcattaggcaatttatgctttaatggtcaagcttttaaaaatttgtatttgataacatcctgaattctcagtttcgaatagtgcctactggtttaaaactaaaaataatacagctttttggacatttaaccaagatactaagaaggttttttttaaaaaaagagatttgattatttttccctgctaaaaactgtaaatgccttatgttcttttcagataacttaagtctkacctaaactccagtattcatctgatgctgtaaattgcccttctttctgagacacagattataagatgccagatcataagacatcatgattttattgtaattgaattcttcctaaaaattgagaggtttccttttattaacttttaaaataaagaaataagtagtttcattacgattattttgcaaactattgccagtcagaaatgcactttttttttccctgaagttttaggagccgtcactaaaacattagtcttgtgattgttaaaacttgtttgtaatgggttggtgcaaaagtaattgtggtttttccattactttcaatggcaaaaaccgcaattacttttgcaccagcctaacaatagttgattagttagaccttttctgggttttgtattgattatcttggtgtgcatttaattatttttctgaattcttcatggataatgacatagtaattgtgattcttttaataccagttaagcagtatttggcaacttaaacttcctgggagcctaactttactatgttaagtgagtcaggtgtgctttttatttcccttgtttctcattttgccctgtcagtggatggtagatgctttgtatatcttaaatcccttaaaggatcttaaagacatccctcaggtgttctatttaacttttattttattttattttatttatttatttattttgagactgagtcttgctctgtcgcccaggctggagtgcagtggcatgatctcggctcactgcaacttctgcctcccaggttcaagccattctcctgcctcggcctcctgagtagctgggattacagttgccgccacacccggcttatttttttgtatttttagtagaggcagagtttcaccatgttggccaggctagtctcgaactcctgacctcagatgatccgcccacattggcctcccaaagtgctgggattacaggtgtgatccaccgcacctggccctaacttttaatatacaacacacacacacacacacacacacacacacacacacacacacacacacacacacacactatttcagaagacagtgtgttgccttacccagaatgagtgctaggattacaggcgtgagacagacacacatacacacacatacacacacacagagtctttattgcagaagacagtgtgttgccttataggcgtgagacacacacacacacacacacacacacacacacacacacagtctttattgcagaagacagtgtgttgccttaccagaatgagtgcttggattacaggcgtgagccactgtgcccagccctaacttttaatgtacatcacacacacactcacactcacatacacacacacacacacactctgactgtctttattgcagaagacagtgtgttgccttacccagaatgagattgaattgttttgcttcgttttgttttgttattcagtgttgcggtagcagatgcattatcaaaggaaaaatatttggctcctttaattcctctgaaaacatgagtattttgagttctgcagcacaatgactgtaggactaagctaagtctgctttgcagatatctgatcagatagtcccttcattctgtagacgtgtattggttggtccaagacacagtgagtaggagctctgtggaccaagacaaagctggactagagagtacagttcaaacttggcagtttctctaacgactctgtatagcttctggcttctactactgaaacaagagtttagatcactgatggagaggcatagtaatctgtttgtgctttggaaaaatatataaaagtttttttcccctattttttgcactttaaatctgttttgaaattagaactgatatacatttatttgaataatgtgtaactattatggatctattttaatgaacaatttttaccatttcccaagctgcctgtttattataagcatgacatgtttactataaaccttttgcccccataatttctttttttaaaggaaattaatattagtaaaataaacacctctttaatggaagctgcaaccttctagtgatccaagtagacaatagatggtggcatcacagactttatctacacactttcgggtctgaccactacctcccacaatacctagccattttggaaggggaaaacatgcggtggtctagctgtatagctcagggcttaatttcagcttctgagattgtgatgtcatatttcactctcaaaacataggctgaaagcacgaattactcaaaaagtaagcaaaccaatacctggtgaatctatggacagtcatacacatacatcaggggaaaatgtgtgtgtacaacccaaatttacagtatgattgtcattctttgactttgttttgtatagcctgactctgttgaacatgaaattattagtactctaggttttggacagcttgagttcatttgaattccttccttaggaataagtttttatatacactgctaaatgtgtgatgagaatcataaaacactaaccagctgaggtagctgtgattcactttccccccaccctaacttgagataaaatgaaggactaggcaagtatttcatgttgtgtgagtggacttcggttccttcagtattgtctaggttattgagtctttctttgcctaatagtggattcccactcttaagataacttttattagtgataaatcagtttagggtatattctgtatgacaggcataaaatgttaagggtgaatgctggccttttccaagaaaaggccaccttaacttgtatgaggaaaaaatcctaactattctcttttttgtatctttttttccgtaactgttttgattgtatattttaaagaaaccacttaatttgtgatgcacgtaatatttgtgtgaacctgagaatatgtcacaataggaaaaagcagaaattatacttaggggacatgttaggggggtaaaaatatttaagcctcgaatgttttactgtcatctccactaactatttttacagaaaaagctaaaaactctgttgtaattattgtaagtttacttatttatacttttaaattaggcttttcatacttaaatttttttgacatttgcttttaatatttgtttcttaatgtggaaattgtgtattttaataatcaaattattaggataatagatatatttttaaacattcacctcattaacaaatagatctttgaatttttattaggttttttggctccagacaactgtttagctttaatgatatttctaaattcccagtgacttattaataaaaacaggaaaaatatttaggtaatgtcataaaatttattttacctttctcattttctgagaaaataaatgaaaaaaaccctagatattgctttattaccaacagtgtgtaggtttttgtacatatggaaatttgacacaaaaaaatagggaatttgtatagagaagtttccctcttataaaaggactcccatttgattgttcgaaactataaaatgcacttttactttaccatatctgaaatgacaaaatatcgccctttggaaaacctgactctttgcacgtgtaattcccagagtctacctcagttaaccaggcttagttttaggcaggaatgaattgaattaaattcagttcatcatctatgcagatttgtttcttttaagcacatccttccctcctgctgttgccctcctcccattaacttttctttttaatcttgaaattgtttaaaatattccatctttctttctctagcaaagtgtttgtattccaaataaggcctctgtgaaatgtctgaattacttttcccgtctttgttatggtcagcttcattatttggatgtattgcattcaaagcagcagttccaaacataacacacatctattttcttagagttttgtaaatacaaactaacctgatgacattaaaaattgtggatcctacatgttcctatgttcattctctaaaaacctgagtaactttatgaaaacacacaaacctggaaaaacatcacatttttgtcacatttttactgacaaatgtatattcatatgatggtacggcagcagggagtggcccccagttaacatggctgtgagtggacacagtgtctcgcaggatcactgcatgttatgatggcttgtaagtgcgttgttaagacttttgtttcagtgtttgtctcccagtatttgaacctaatttaaagaaaaagacgtttccaagttgtatttattaaatgtgtttttccttaccttttgtgctgctactttgctaatctcattagcttagctgtgtttgtgcataggttatatttggtaataaatttatagagtgttggttgtcatcgctttctttgtggttcattttgacctatagtcacgggtgcacttcttgccaccagtgggagcaacaaacccctcactagtaagggatggctttccccagatttttgttctcataaaatcacatattataaacctgacattttgtatttgctgtgcttatgccaataatttcaaggttgatgcaggtaagatgtgtgttttttcagttaattccaactggcataatcaatacacttgtcttatttgtgtagcaccattgcaaagtagatgttccatatggtgcattttctagatgactaagtcttactttatgacctcctccaaacaatttttttagttaatagactttattttttttagagcagttttatgtttacagaaaaattgagcagaaaatttggagctcccatttacttacaacccccgccccagtttctcctcttactaacatcttacattagtgtggtatatttgttataattgatcaactgatgttgatgcattattattcagtaattgacagtagttgacattagggttcactttgtgttatacacttttatgggttttgacaaaagcataatgtcatgta

SEQ ID NO: 95450 - DNA, 26972 bp, Homo sapiens
gaatgctgagaagattgtaatgctttgtacaaataaaagtcttgttaaaaaatgatgcctcctgtttcatgctgcttgttcacagtgtgtttttggagagagcccctgatgatactctccatgcagtttttggcgtgtggtcctggccagacctttgtaaacatgagatactgcatcgccttggatgaccagcaggtgctgctcattcacaggcaagggctctgaactactgcaagagcatttgttttgttttgttttgttttttttgagacagagtctcaatctgtcgcccaggctggagtgcagtggcatgatctcggctcactgcaacctccgcctcccaggttcaagcaattctcctgcctcagcctcccaggtagctgggattacaggcacccaccaccatgcccagctaatttttatatttttagtggagacagggtttcaccatgttggctaggctagtctgaaactcctgacctcaggtgatccacccacctcagcctcccaaagtgctgggattacaggcgtgagccaacacacctgctgaaagagctttttttttttgtagacggagcctcactctgtctcccaggctggagtgcagtggcatgatcacggctcactgcaagctctgcctccagggttcacgccattctcctgcctcagcctccctagtagctgggactacaggcactcgccaccatgcctggctaattttgtttttgtatttttagtagagatggggtttcactgtgttagccaggatggtttcgatctcctgacctcatgattcgcctgcctcggcctccgaaagtgctgggattacaggggtgagccaccatgcctggccggtgcaagagcttttcatggatgtgctgggcacccttatacatactagattctcagcagcttcatttattgagccccctactgtgtctggcactaactgctttcaagtattaacccttttttatttttatttatttattttttgagacagagtctcactctgtcaccaggctggagtgcagtggcacaatctcggctctctacaacctccacctccctggttcaagtgattctcctgcctcagcctcccaagtagctgggactacagccgcgcacgccaccacacccagctaatttttgtatttttagtggagatggggtttcactatgttgaccaggatggtctcaatctcttgatctcgtgatacacccgcctcaggctcccaaagtgctgggattacaggtgtgagccaccacgcccggccttaattttttttttttttaatttgagacagggtctgtgttacccaggccagtctccaactcctgggctcgagcaatcctcctgccttggcctcccaaaatactgggattacaggcataagccaccacacccagccctaagtattaactcttaaaccctatgaagcagcactgctgttacctttattatctctttaccacaatgctatatcacctatctaatctacatagctttttcttttttattttgagacagagcctcgctctgtcacccaggctggagtacagtggcgtgatcttgtctcactgcagcctctgcctccccggttcaagtaattctcctgcctcagcctccctagtagctgggattacaggtaccggccaccacgtccagctaattttatttttagtagagatggggtttcaccacatcggccgggctggtcttggtctcgaactcctgacctcaggtgatccgcctgcctcagcctcccagagtgctaggattacaggcgttcctttttttttttttttttttgagaaggacttttgctctgtcgcccatgctagagggcagtggtgccatctcggctcactacaacctccgcctcctgggttcaagagattctcctgcctcagcctcctgaatagctgcgattacaggcctgcgccaccacacctggctgatttttgtatttttagtacagacaggatttcaccatgttggccaggctggtcacgaactcctgacctcaagtgatccgcccggctctgactcccaaagtgctgggattataggtatgagccaccgtgcctggccaaatctacataatctacatagcttcttcaaatcataaatttataaataacatttcacaaagatacaacccccaatactcattagatctaatagctttttccttcacagtagaaacatcctttcttaattcccatgagcactactcaacttctgtggcttcctttaagctcagtcccctgcctcatctccacttcccctagtctcctctgtggattacttggcacgtggatcttcctggagcattgctgggttacagaccctccttgtttcctattaaatcaaatctatacttaaacctattattcaaagcctgcawgagaagggctcaccctgctacctattttaacctgccactctctaacaaggctatgtgctctagtcaacggtgaatccccaaaagaactcttccatatggctttagttaattctgccccattcatcaccaaacttggactacctaagaaaaacatgtttcctgaaaatagggactattactttgaaactacagaatttggccgggcgcggtggctcacacctgtaatcccagcactttgggaggccaaggcaggctcatcacgaggtcaggagttcgagaccagcctggccaatatggggaaccccttctgtactaaaaatacaaaaattagccgggcatggtagcctgtagtcccagctacttgggaggctgaggcaggagaatcgcttgaacccaggaggcagaggttgcagtgagctgagactgcgccactgcaccccagcctgtgtgacagagcaagactctgtctcaaaaaaaaaaaaactacagaatttaacaactggtaaaaatttttgacatcatccaccagtattccccccaccacacttctatcattactgcagtggtatctggacttttgaagttccttactaggctaaggtaatgtttcacttttttaccatggcccttcatgcccagagattctgatttggattcgggaggtgggagggttctcgtcccaacccattcaaagctacttttgcagcctaacctcctatttttactgataggaaattgaggttcttcagagagaagtgacttgctcaagatcttaccaagaatttatgaaaactgggattctgttccaatgacctttggccttgccccgtttttttttaataagctttttatatttcaacagtttctctacttatgtcctttttcgattacaggggccaacccagaataccacattgcatctagtgaactcactttttaagactgagatgaaattcaaagaacatagaattaaccatttttaaatgagcagttcagtggcatttagaacagtcacaatgttgtgcaaccactacctctatctagtttcaaaacattttcctcaggccctggcaatcagcagtctgctttctttcttgttccttttttatgcttttcacagcatttagcacaatgccatatacctacctagaagacactcagaatagtttagttttaactttttattgaaacgaaatatacatactaaaagacacaaataagtgtggagcttaatgaattttcacgaattaaacacagccatgtaactcacacccagaccaataaacattaactgcatccaaagaaacctctttagtctccccctgccgccttttttttttttttttttttttttttttctggagacagggtcttgctctgtcatccaggctggagtgcagtggtacgatcacagcttaccgcagccttgacctcccaggctcaagcaatcctcccatgtcagcctcccaagtagctgggactacaggtgtccaccaccatgcccagctactttttgtaatttttgtagagactgtttcgccatgttgccaaggttggtcttgaactcctgggctcaagcgatccaccagccttggcctcccaaagtgctaggattacaggtgtgagccaccacacccagcctaatctccctttcaatcctccccatctccccagtggaaatcactattctgagtcctaacaacacagcttaattttgcttgattgtgtagttaatataaatgaaatcatattatatactcttttgtgtctcacttcttttactcaacaatatgtttaagatttattcatattattgcattcacaatactgaaagattaaggtaaaatgtttcaaaaggtggaggctggggggagagtgggaacaggtctttcagtcaagaagaagaaaagacatgggggaaataagctacaccaaacagcaacattttaaaatttcccgttctatttgggttcttagatggttctaattatttttagttaccaataacctcagggaaggaatgagtgtcaggaaagaaatgtcgggcagggaatctaggaaaaaacaaataataattgcccctatggagtgtggttattagcaggcattgcagagagagcccagtgtaacatggggcaaattatttaatctagctggcaattgttttcccaatccgtaaagtgagaatagtaacatcgttgctgtcaagattagayaaatgaatgtaaaatgcatggtactgtccctgactctttaatgcacagcaaacattatttgctttctatccccttccttgttgaatacagatcagaactccagtagctggaaactaagcagtgtcatatttccctagccttacgccgctaggccccttaaatttaaaatataaagtatacaacaggtttggggtacagattttgagaaatttaaaaaaaatttttttttgagacagagtctccctctgtcacccaggctggaatgcagtggcatgatctcagcccattacaacctccgcctcccgggttcaagcgattctcctgcctcagcctcccgagtagctgggattacaggagcccgccaccacgcccggctaattttttgtatttttagtagagacagggtttcaccatgttggtcaggctggtcttgaactcctgacctcaagagatccgcccgccttggcctcccaaagtgctgggattacaggcgtgagccaccgaaccgggctgagaaataaaatctgagaataagtgtaatgtaacccactagtgtcctctacatttgaaagtcaacttttcaataatccctgaagaaccacctgaaaggcattgcttcgctagggcgatgatgcccgatcgccattttactcatccaatcctactggtttacccaggccccataagcctcaccagatccctcttgcctctgcacatctccaatctccataaagacctttgatcggatctatcattgtacctatcataggtctgatgcccctatcaagacttggagttttcctaaacgcccatgtctttcacatcacatctctcaactcatagcattgccgtaccctgagaaataaatgaagctggtacaaattttctctgaaaacttggaagcctggcgctgaactcaacaactttagcttagtccgcaaaaatggacttagctaatactgtgttaggcataatggtgctgttttaacggctttgacatccaattattctttcaccaagccattaaccagagccaagtttgccctaggctgggcaaaggaatgctgtgaagtgaaacctgggctgtaaccgcctccgaggccggctcacacccagggaccctcccaagcggttcctgcgccccctcgtggcctccctcctgcagttcgctgcacaagcgcagggcccggagcggggacgggcgggccctccaggccctcgacacacccaattggccaggcctcgttgcgtgtgggcggggccgcggctggagcggaggagccccccagaagaccgccttcagggggcgtggcctggactgtggagggggcggaccgtggggaagctgcttccgggtgagccccccccgctcttacgcggtctgtgggagaccggagcgggagacagcggtgacaggagcagcggccgggagcccttagggaggcaggtgagcgggggctggatgcggggagatagcgggcctggagggcggctccagggcgaggcggggactgtggcaccaagagtcctgcgtccccagattgtgctgtgcgcctgaagccctggcggtgcagccgtgcacggagtcccgtggagcgtttgtttgggctggattatcccgctgcagccgaggttgggggcccgggttcggggctccgcacctcttctctggggttcaccctctcggataccgcctgggcagactccatcgatgcagaacccgaggtgcgggtggtggttggtgggggggtagggaggtgaaaacaataacagccgttttgtactaagcgwwgcgtgcattgaccattcatttattttatktatttatttatttttgagacggagtttcgctcttgttgcccaggctggagtgcaatggcgcgatctcagctcactgcaacctccgcctcccgggttcaagcgattctcctgcctcagcctgccaactagctgggattacaggcgtgtgccaccacgcctgctaatttttgtatttttagtagagatggggtttctccctgttggtcaggctagtctcgaactcccgagctcaggtgattcgcccacctcggcctcccaaagtgctgggattacaggcgtgagccacyacgcccggcctgacccattcatttcttacaacaacccattgaggtcggttctagtccccatttactaaacraagaaactgaggtcacacaactagaaagctacagaactaggatttgtacccacatctatcagactccagagcccacatacttaaccatcctgctaccaacagcagccaggcccagagtctggctcacccaaagctctccacaagcccaacctgctgggaaacagatttgatatctatccttaaagtatggaggtgtcatggtgggcactgaggactgggctgctggagaccttcccccagatctgccgctgacccactgcgtgatcctgggcctgtgtctacccctctctgagcccagtttcacccttgtttcagtgatacaatcagcaaactttaagaagactcttagccaagatattctaggattctgggaatggcagcttctcctacgtctaaatggctaaccccagaggcgatcaggctcttcaaagccccagggcaaggctggggtctcattcttctctttaatccctgtgtctagcacttcagcaggcccatagtagatattcaagaaatgtgggttggctgaataaacacttcatctcttttcagaactgcatgacagctgctctcctgggcctttgtggggctttggatttctcagttctggccaccttctatctagctggctctcctgactgcctcctccctggccagtggcagagcctgccagggctggcagcaggtcctaascctctgtgcgaagacccacagcctctggaatcctcagcatagtacaacttgcaggggtggggggtggcacatgaagctcatagcccctcctggtagcagtgctcagggcccaacttcagttactcccagtttggggatgttgccttccatgggaggagatactttcatattaaatctgaaacacttcttatccttcactgtcccctcttccatgaaaccacccttgactcagagacacagtccctctgacagcacctggtccacccctctactctggcagcccggtggtgattattttgtttttcctccaccacataacctgctggaaggcagggactccacttcagaaatcttggaaaaccctgtggcccacaagggtttgagctcatattcccatctggtgaggtgcagaaggcacagagctgygccaggacatctcgttccaacccagccccactcctaatagtaataaaagtagctacatgtttactgtgcagctacttggtgccagacacctaccttatccctatcaataatctccacagccttgcaagttagagatatcatgcctattttgtagattatgaaatgaacactgaaaggtcaattactttgcccaaaattacacagcagagcatagaccaaacctgggactgtctgaccctgaaacatggatctttctgcaccgccctatactctgcgtcccagcaaagctaacctgtctgatgtggttgggcagaggtgctggacctcctggcggctcgctcctgtcttcagtgtggtaatgtcacaggcatttaaattgtggtttgcaagctcgcttgatttgggagaagtgccctcccagtctgtgaaattctcccaaactctaagggcctttttgcaaagcaaaacccaccctgcatttggctctgccaatatgtgattcagggggtgttttcccactcacagaatggagtgggaaactccacttattaagtacctcttacaatggaatgactctatggtgtaggtatcagggcactgaaatagaagccaggagctgcagggtcagtttatagctctgtatgtcactcactgtgatctccaaaagtcccgttgcctctttataccccattttccacattaaagtgtaagggattaaacaggattggcaattttcaagcttttaatattttcagcactgacakccgtttctcaaatcaaatctgtctctgaatcttaaaattcaaaaacagatcaaagtggactgctgtagtgagactgttccctttactctaaccctgccccggtctcaggctcctaggcagtcctgccccagggtttctgctaagcaggagccagttgttccctcagcctcctaaaagcgatggggagttgaggccagtggaatgcagctttggattcagaagccagaaaacaacagagattgtttgtgggaagtgagtcagagagattagacctctcttcaacatctgactagactctagaatggcattaagcaagtcactgaaccgctcagagcctctgtttccttatcactaaaagttaggacaattcttgcaatgaaatgagatactactaccaagtacttcagtgctgtgcccagcacagaacgaatacactcagtatgtttttcttttgtttcttctgtctctccagcacccaaagcagaaacagtatgggcagagagacgcctactgaatcaggtgtttatcagtattatgaaatacagtatataaaacccagcatttggagtccagaacaaattcaaattctggctcagtcactaagtagctatgtggtcttgggcaactggcttacattttggtaattctctcaatatkcaaaaatattctctcggccaggtgcggtggctcacgcctgtaatcccagcactttgggaggcagaggcgggcggatcacttgaagtcaggagtttgagaccagcctggccaacatggcgaaaccctgtctctactaaaaatacaaaaattagccaagcatggtcatgcatgcctgtagtcccatctatttgggaggctgaggcaggagaatcacttgaacccaggaggtggaggttgcagtgagccgagatcgaaccactgcactccagcttgggtgacagagccagactctgtctcaaaaaaaaaaaaaaaaaaaagaaaaggaaaaaaaactcctggcagacatgagagcaaaatygagtacgaaatgggcagctgggacctcatatctactgaataattgtctgtttggaggttgagacatgactggggaggcctggcctgcccctgtgttaggtgatggggctggcccacccaggggtgtggcagcagggctggsccctgtgtgacttgtgataaccccaccctaccaaggaggaagactggataaaatgggcccctgagatggctgaaggcagctaaaggggcctaagagactatggggagaagggcagccagttcctaggcagccctgccccactgtttctgataagcaggaggcagktgttccctcagcctcctgaaagcaatgaggagttgaggccacgggaatgcagctttggattccagaagccaaggacctgttacaaaggtggttttctgggaagcaaattagagggattagacctggcttcracatctgacttgactccaacctaccaaaggatctcccagttcacctgggagttaacacaccagggttctagtccttttgctcgctgtgtggctttgggtaagtccttgcccctctctggaccttgaggtcccattcatacaaaaagcagyyggactcaggcctgccagcccccatttttgtggctcttccccgcccctccccatcctttggctatgggatagtctcccaggcacctccaaaaggaagtgtctaaaacagagctctccacctcctctccaagcccagctccccactgcccycttcctgccctgtccctgtctccrctgccctttagatcaggcaggcaggcaggcctagagcatcckccctgagacactgcctgttggctgccttaagacgccccttccttctctgcccgcagcctccccagcctctgcattcctctgcttcctgwctgctctgctcagcctgcaggattgatcttcccaaagccaggtgtcaaccaggccactaaccctacccactgctcagaaatcttcccacagcctcagcctggccccctcttatccatcccctccatacacacttgcctcagctcctcaaaacagtccacagccatcctccttccccacctttgcccctttcttcccttcctaaggaaatattggcccccttctctccaccaggctgaacccactcatcctgcaaaaccaagttcaacgccctgtcattttcttttttttttttttttttgagatggagtctcacactgtcgcccaggctagagtgcaatgggtgcactctcggctcactgcaacctctgcctcctaggttcaatcgattcttctgcctcagcctccagaggaactctgactacaggtgcacaccaccacacccagctaatttttgtatttttatttttatttctatttatttatttattgtgagatggagtttctctcttgttgcccatgctggagtgcaatggcacgatctcggctcattgcaacctccgcctcccaagttcaaaggattctcctatctcagcttctgaagtagctgggattacaggcrtgtgccaccacacccggctaatttttttttatttttagtagagatggggtttcaccatgttggtcaggctggtctcaaactcctgacctcaagtgatccacccacctcggcctcccaaagtgctgggattacaggcgtgagccaccgtgcctggcctaatttttgtatttttagtagagacggagtttcaccacattggccagcctggtctcaaactccagacctcaagtgatccacccgcctcagcctcccaaagtgctggggttacaggtgtgagccactacgcctggcgcctgtcttcttctaatatgcctcttctgacctcctcactcccattggagccatggctcacttctggtcaggctccatgcactcaatcagccctgcctgccaggactgtagtgcccacttgatgagaaatcacctgtgaaaatgccaggcatggtctggcacacrgtaggygctcaagaaacaaatgttaatgccccagcttccttctgtcttgtgtccactaatttggcatttggagcatatttttgtacttcacgtaattaaatatttactgtgtgccaaggtcagtgtgtgacagagcactgtaggggaggcaaaaatgaaccaactctggaccttgccctgcagaagctctgtctactggcatgaggtaagacaggtccacagataacttacataagagagactgcaatctggacaagacagcctcagtgggagagggwwggagaaccctgtagatttgggtgcggggaggctgtggggagagcacagcctttcaggtaaagggacaaggttaggaaagcaagaaggtgtagcttgtgctcgtggagcccaggaaactccttgggctagaaaagatttggtggcactctatacagtgtatgtgtctgtctgtctatctaacatgaatggtactattttctcctattggtgtgcattgtacctaacaaaaaatccatgtcccaagtacttttctcttttctttctttctttttttttttggaatgaagtcttgctctgtcgcccaggctggagtgaagtggcgstatctcggcttactgcaacctcctcctcctggattcaagcagttctcctgcctcagcctccccagtagctgggattacaggcacgcaccaccaygcccagctaattttttttgtatttttagtagaggtggggtttaacygtgttggccaggctggtctcgaactcctgacctcaagtgatctgcccatctcagcctcccaaagtgctgagattataggtgtgagccgccatgcccggccaacagtacttttctctagaggtagaattgcaggggatttttctctttttgcttatctgcacttttctaaaagttctgccatgaacacgggcattttttgtggaataaacaaagtttaaatgttggctagatcagtgcttctttatgcataaggaaggattagttcttttttttctatttccaatttattgattctttgataaaatgcaatgcaataaaattattatttttttttagagacgtctccctctctcrcccaggctggagtgcagtggtgcaatcatagcttactgcaaccttgaactcctgggctcaagcgatcctcttgctttagcctcctgagtagctgggactacaggtgtggaccaccacacctggctgatttttaaactttttgtagatacagggtctcgccatgttgcccaggctggtctcgaactcttgggctcaagccatcctgccacctcagcctcccaaagtgccgggattacaggcgtgagccaccatgcccagctagaaaattacttttttggctaggcaccgtggctcacgcctgtaatcccggcactttgggaggctgaggcaggcagattgcttgagcccaggagttcgagaccatcctgggaagcatggcaagacctccatctctacaaaaaattcgaaaattagctggatgttgtggtgcacacctgcagtcccagctacttgggaggctgagttgggagaaacagttgagcccgggaggtcaaggctgcagtgagtcgagattgcaccactgcactccagcctgggcgacagagaccctgtgtgaaaaaaaaaaaaagaagagaattttttttaaacagtcattgcttgctcagatgtttactttaaaagataataatgaacaagaagcagtcacataaaatacaagcccaaattttatatcattagattctgattgtcatgaaagtttctaaagacttactttcatttctcaacttaccttgttgaccagcagggattggtgaaccakgctgtgagtagcattgggctagagagaggggaggcaggaatctagaagagctgttttccagatgtgaccatctcctgaggacagggaccatgtcyyatgtgccacccatcaccccccacagacagagcctgcagccaatgccccaggagccctcggttccaaccaactgatgcccctgtgcccactggcccacgccatgcagccccagtccgttctgcacagcggctacttscacccactacttcgggcctggcagacagccaccacyaccctcaatgcctccaacctcatctaccccatctttgtcacgtgagtctccaagaatgggccaggcctctgctctgctggttggggttggggttggggagggagtgttgactggagcgggcatcagtatggctgggggtggcaaagtgagctgtcagcttgaaattcaaggcactggaagcaggctacttggattaaggacaggaatcttaggaacaaaacaaactttgaaagaactcattcatcccatttggaaaattagaagaataacccttgcctgccatcctgagctcttgcagtaagacagaagctgagaaggtgctctgtacattgtaaagtgytatgtacctgtaagagatggcagtcattgaggctgggcacggtggctcacgcctgtaatcccagcactttgggaggctgaggcaggcggatcacgaggtcaggagatcgagaccatcctggctaatatggtgaaaccctgtctctactaaaaacacaaagaaattagccaggcgtggtggcgggtgcctgtagtcccagctacttgggaggctgaggcaggagaatggcgtgaacccgggaggcggagcttgcagtgagccgagattgcaccacttcactccagcctgggcracrgagccagactccatctcaaaaaaaaaaaaaaaaaaaaagagatggcaatcgtgattgttaataataatgcagacatttactgagtacttactatctaccaggtactatgctaagcacctacacacattatctcattcaattctgagagcatttgtatgaagaaggagtagctatcctctagaacatcagctccatgagggcagggatgtttgtctattttgttcactgttgtatcatcagggcctagaacagtacttggcacataataagtactcaataaatatttgttgaatgaatgaattaaccacgcatgatatagatgaaggcctaaggctcaaagagatgatagaacttggccacggtcacccaggcagtaagtggctgggatagaaagcaaggacctgccaaattcagagtccaagttcttaaccacttaattccttcctgtaattaccgttcttttagtacagttgctagtgttgtcactgttattcttgttgttcctattattatttcaggccctgggcttggccaggcagggaagccagacactggatcccatcctcctcccaccatctccacttccatatttctttcctgcttcccaaccatccctctcagtcgcccccgcaccactggcccttcccacagctaccaatccatatcccacccccgctcttgcagggatgttcctgatgacatacagcctatcaccagcctcccaggagtggccaggtaygagacgtggagttggggggccagcgggtggtggagggagagattccacaggtggaagtgctgggaggcagaagcagacctaggaagtagaagatgcggacagacagacattagctcagtagaggaaagggtttccccggggccagagctgttccacagtggaaggggcagccccataaagtaaagagctacccatcacccgagacgtcgtggcagaggctgttgcagaagggagctgaactgcagatgggagttcaaaaagagggcctcgaaggagccttccacagccgaattccggagctctgctactcagggcctcagtcttccctcctatttagtggatgcatccctgccccttctgtcctgggggcttgagccctcctggtgccatatgcagcttggtttctaacagaggcacacagtgtggtggggtccggaggaccgttgcctgggacctgccttccttcaacccctctacccacacccacacaggtayggtgtgaascggctggaagagatgctgaggcccttggtggaagagggcctacgctgtgtcttgatctttggcgtccccagcagagttcccaaggtgaagaatcaaaggaagggctaagaagggaggttgcgctcacgcccgtaatcccagcactttgggaggccaaagtgggtggatcacttgagcccaggattttgagaccagcctggacaacatggcaaaacccatctctacaaaaaatacaaaagttagctgggtgtgggggtatgtgcctgtagtcccagctactcgggaggtggagaggtgggaggattgcttgagcccagaaagtygaggctgcagtgagccaaaatcgcgccagtgcactctagcctgggtgacagagcaagaccctgtctccaatacaaacagaaaaaggaagggaggttgggcaaaggtggactgagggtccacactgactgcaccctcactcccacattgtgctggccctggggccacaggtgaatggacgtggtctttgcccttaagtcagcacccatgtagggtcrgtcctctgtgcttccttatccaggggctgtgatgatgaaggaaggagaaggccagggctatgctctgtgatggctgtcatcctgccttccaaagctacatgyaatagacacactgctttgtccctcccctgcccctaggacgagcggggttccgcagctgactccgaggagtccccagctattgaggcaatccatctgttgaggaagaccttccccaacctcctggtggcctgtgaygtctgcctgtgtccctacacctcccatggtcactgcrgtgagttccctycctcccaccagccctgctgccacccacactcctactgcccacttctcaacagggtggggacaggccagggcccaasgtgctccccaaaacccagtcatctgtcctgaagggctcctgagtgaaaayggagcattccgggctgaggagagccgccagcggctggctgaggtggcaytggcgtatgccaaggcaggtgagtgaaccaccagcagggatgggcacctctgggtcaggaggtggcagagtggctaggagggccccagagttctgaaggccaccctctgccccccaggatgtcaggtggtagccccgtcggacatgatggatggacgcgtggaagccatcaaagaggccctgatggcacatggacttggcaacagggtaagggcagggaatgcagcacagggctggcaggagatagtctgcaccagccctgcccccgtgtctgctaagaatcacagaactgccgggcgtgttggctcacacctgtagtcccagcactttgggaggctgaggcaggtagatcacttgaggtcaggggttcaagaccagcctggccaacatggtgaaaccccatctctactaaaaacacaaaaattagctgggcgtggtggcaggcgcctgyaatcccagctactggggaggctgaggcaggagaatcgcttgaacccacgaggcagtgagctgagatcatgccactgcacttcagcctggatgacagagctagactccatctcaaaaaaaaaaagaatcacagaactgaagacagtgctggatgaggctttggggaaccatttaaacctctgggcctctgcagggaaatcaagcccagcactccaacaggaccagaacacaggcagtctccttcccagcctaggttctttctctccctgccacatcaccctgggatacctggcaagggccgaataagccaagacctccattgtctccccataggtatcggtgatgagctacagtgccaaatttgcttcctgtttctatggccctttccggtgagcaggggtgggcaggggtctgctgtgaatccctggccctttggcccaaagckggagcccaccctgatgactctgctttgcagggatgcagctaagtcaagcccagcttttggggaccgccgctgctaccagctgccccctggagcacgaggcctggctctccgagctgtggtgagtgactaggacttgagccccaccctcagccccctcctaggcaccacccayattataccctcatcccttaggacygggatgtacgggaaggagctgacatgctcatggtgaagccgggaatgccctacctggacatcgtgcgggaggtaaaggacaaggtgagcacaggtacgaggcaaagggggctcagggggctgggacagagttttccacagactctggaatctcagagttggaagcagtttgcccttaagcatgcatcctctcctccccttccctgcccaggaaccatcgtggccttctatgtcggggcttgcacgagcctcaaacagccctgctttaacagttyaagagtgggccaggctgccagccgcrgtaacccaggacacggggctcaagatggtcacagattgagcaggggggaagggacgcttccagagccacatccaccctccatttcagcctgtctccctgtctgcttccctgcagcaccctgacctccctctcrccgtgtaccacgtctctggagagtttgccatgytgtggcatggagcccaggccggggcatttgatctcaaggctgccgtactggaggccaygactgccttccgcagagcaggtaggcaggcaagggtggggtgttttgacctgcgccacagggactgataagcactctgcctagatyggggaacgacgtcctgagagcttgggatcttattccgggaattactagtgatctaaacagacacacactgaggaagagatatggaactgcagcatagaacacsgcccggtgaagcaagcagagcccttcatttttggttgtgagaacgtgggcaagccacttctctgaacctcagtgtcctcacccataactggataactggggataagatacctggtgcgtggttgtcctgaggattaaatgaagtaatatcactccataaaggggactcattttgttagaattgcacaccagcatgggaaggaacttgcctcttacctatttccttcactgtgcattttattctttggtaaactgaggccccaaaagaggaaatgacttgcccaagaaatagagtttcccaaagctgggctccgtctcatgtggtgtgcccacaggctgtgcttcttcatggtagccttcttccccgcctggccttcccatcgcagaaggtgtgctcagagctgatcagcgtccccccagcaactttctgcatctctcccaacacaggtgctgacatcatcatcacctactacacaccgcagctgctgcagtggctgaaggaggaatgatggagacagtgccaggcccaagaactagaactttmaaacgttcccggggcctcagacaagtgamaaccaaagtaaatgctgcttttagaactgtgccctcatgccctcttcctgctcacatgctagcggggcccagcagccctgggtggttttgccagcatgctaactcttgtaactcrcagctgcatcctatgagctctcccaagcttccccgcccctcccctgggtcagccgtgaggcccacctttgccaccctcagctctttcctctggtgtggcttcagcttgaaagcaacctggagtcgggggcacagcctttggggcctggctgggagagggtcttggagcattaggggaagaagagagcagtgggatcttggggcctgagaagccttggaacgcttctggcagcagagctgggtgtgggaatgaggcctagatcgatatccctgggttagagttgaaatttgcygcaattccactggaaggcatttcccacgaggccagaggttgccaggctgcctgaggtctcctattctactctgaaccataaacccagagaagaattactcattaaccagcataaatactgcctgaggatcaaaactcagagrcaaagagggagttcctgactgctagaggtgccaccaccacaaacactttttattcaggagatactttttgagaatctctgctctgttcctaggttcagtgctgggtcctgggaatacagcaggacagacctcagcttatctcttcatagaaattatacaaagagaattggggagacagctaagaagaaaacaaagaaataaagcagttacaaattgtgataagtgctttgaaggaaagaaggggtctgagacaacaacagggaaggggcctctcttgaaacagtagttgggaaggaggcagacatgcaccagtgatgtggtgacaggtgctctgaaggaggtcaccaggacctgacctctttgaaggatcagaaaatacttccctgaaggactgacatttgagcctagacctgaagggtgagccatcaagctaagacaattggggaagagcattccagggagagggaggagttgtgcaaaggccctggggctccttctagctggaggaatgcaaggctagcttgtctggagcactgagaggatggcctgaactgagtggagagagacagaccaggaccaaaccatgcagaggtcaagggccacattcaccttttcagagtgactcaatcaaatttgtagtttgtaaaagtattttaacagctctgcggcaaagtgcaaatgaaaagtcttgatggcatggactggagcrgggacagtggggatggagaaaggggaatggattgtggatgtgtttagaaggtagattcgatgtgaaggatgaatctggcttgaccttctgggtggctgatgggccatttactgagatggggcagcctggaagaggaacagaagcagggtckgggtggagggagaatactaaacttagcttgagacattttgcaataaggaagctatatctagagtgcttatgtgactcacctaaggccactcaacaagtttgtggcagaactggattagaactgcacagaaaacagccaagctgggatttgaacccatgtagtccaactccaaggcctctgcccctaaccactgtgccataccacctcccaataatcaacagcaaaattataggtctaacaatgttttatagacacccctccatttatgtgatgggtttgcatcctgataaacccatcataagttgaaaatatgatcataagttgaaaatatgatcataagtcaaaaatgtatttaatatacctaacctaccaaacatcatagcttagcctagcctgccttaaacatgctcagaacacttacattagcctacagtgggcaaaactatccaacacaaaatctatattgtaataaagttrtaaagaattttgaataaaaattcaatatttgaagtacagtttctactgaatgtcttgtttcatactgttgtaaagtcaaaaattgtgaattgaatgatcacagttcggggaccatctgcaattagccccagttatagggggagaccaaggagaccaggcacctacttggttgcaagtgatggaaatccagttcaatagcaaagaaggacatgattggttttcataactggattgagataaggacaggtgtggttgggcccagggtcaaaccccatggaggtctctgtccctttctaactctcgtctgtgtttgycccagctttatactcaggtgggtttttgccacttgccagcaacatgatcctcaataattctaggcttaaatagttgttaagatttgtaatcccagagaaagagccttcctgtcccatcactcacatagcaaatctctggaggtctctgattgggcctgttcaggccacatggtccactcttggctcagtcactgtaaacaatgggatgggagatggcgccacaattgaccaggtaggcctcattacacagaacgctgtcttggactgagcttttgcaccagtggcctccttggcttggaatgcttttcccctaaatctatatggctgtctctcttgttaagatctcagctcaaagcatcccttcctctgagaaacctgacccaacacccaatctaaagtcactcttggagctgggcrtggtggctcacacctgtaatcccagcactttgggagaccaaggcaggcggatcacttgaggtcaggagttcaagaccagcctggccaacgtggcaaaaccccatctagactaaaactacaaaaaattagccgggcatggtggcaggcgcctgtagtcccacctgcttgggaggctgaggcagaggaatcactagaacacaggacgcagaggttgcagtgagccgagatcatgccactgcaccccatcctgggcaacagagagtcagactctgtctcaaaaaaaaaaaaaaaaaaaagtcattctccagtcactctgtattaatcaggattcaggttcagtggatataacaaaagccaaaataatgatagcttgagatgaaaatttacttctaagcaatccagggctgatatgtcagcaatatgttgtgaggggtctcagctcttgccttgttctgtcatcatcaacacatcttggcctccatctcatgaacaaagatggctggtgctgggcacagtggctcacacctgtaatcccaacactttgggaggctgagatgggtggatcactcaagtccaggagtttgagactagcttaggcaacatgaagaaaccacgtctgtacaaaaaatacagaattatctgggtgtggtcgtgcatgcctgtagtcccagttactcaggaggctgaggcaggagcgagcccaggaggtcaaggatgcagtgagtggtgattgcgcccctgcactctagcatgggaaacagcgtgagaccctatctcaaaaccaaaacaaaacaaaaaaatggctgggccagttcccatcatcaggtcctctttccagccagcaggaagagaagagcaaatggagggcatgacccttctttataaagtcatgacccaaaagttgcacacatcatttctgtctacacacccttgtctcaaattagtcacatggtcatgcccagttgtaagggaggctggaaatagtctagtgggccagccatatgctcaactaaaactcgggagttcagttactaaggaagatggagagaatggatagtaaggcaaatggccatttttacctaatggaggttcttgggatcacagaaacagtggtcagaatattaaagaaaaaagatccttagagactatctagttaaacactctgattttatagatggggagacagacccagagaggtgacctgtccaaaattagacagcaatctagtcagtggcagaccaaggctggaattcaggtctcttaactccaagcccagtgctcaaaactcgggaaggggctgggcatggtgrctcacacctgtaatcccagcactttaggaggccgaggtggcaggattgcttgaaaccaggagttcaagaccagcctgggcaacaaagcacgaccccattgctacaaaaaaaatgtttttcaattaaaaataaaactagtgaagggattcgttttagagggactttagctttatatgtattatttctattcatgtattatatgtaacaaggatatattcatgtgtggctatgtaaataaaaaatgaaaacttaaccaatacatatatgaaaaggtgttatcttcattagtggagaaaattcaagttaaaaccgcaatgagataccacaatacatccacaaaaatgcctaatactggctgggtgcggtggctcatgcctgtaatcccagcacgttgggaggccgaggtgggcggatcacgaggtcaggagtttgagaccagcctggccaacatggtgaaaccccgtctctactaaaaacacacacacacaaaaatagtcaggtgtggtggtgtgcgcttgtaatcccagctactcgggaggttgaggcaggagaattgcttgaacccagaaggcggaggttgtagttagctgagatcgtgccactgcgttccagcctgggcaacagagggagactcgaaaaagaaaatgcctaatactaaaaggacaatgggacaatgtcaagtgttgagaatgcagaacaactggaactctcagatatgactggtacaccctttcaaaatgcctggctccacaagaacaaaaaaaaaaaaagaaagaaagaaagaaagaaaacaaaatgtctagctccagcctgggcaacatagtgagaccatgtctatactaaaaaataaaaacaaaaataaaattagcggggcgtggtgacacatgtctgtggttcccgctacttgggaggctgaggcaggaggattgcctgagtccaggaggtggatgctgcagtgagccatgtttggcctgcactccggcctgggctacagagggagatcctgtctgcaaaaaaaaaaaaaaagaaaaagaaatgtctggccctatttaccaaagctgaacatatgcatacyttatgaccctgtgattccacacctaggtattacccaacagtatttacccaacattacctacgttcataagacacatgttcaacagcattcatagcagcattttataatatatgtaataaggccgggcatggtggctcatgcctgtaatctcagcactttgggaggctgaggtgggtggatcacctgagcttaggagttcaagaccagcctggccaacatgatgaaatcccatctctactaaaatacacaaattatccgggcgtggtggcaggcacctgtgatcccagctacttgagaggctgaggcaggagaattgcttgaacctgggaggtgggaggttgcagtgagccaagatggcgccactgcactccaacctaggcaacagagcaagactctgtctccaaaaaaaagaaaaaagaagtgtaataaacaaaattggagataacccaaatgttcatcaacagtaaaatgtggtctatttatataatagaatattaaaggtgtgagaatggattaactacaactacacatagcaacatagatgtatcaaacacaattttgagcaaaagaagcaaggcataaaaaatacatgctatattattctgtttatatacagttcaaaaacaagtaaagtttaactatgcagtttgaagtcaagatagttacccttttgggtagtaagtaactggaagtggacaggctgtggagggttctggaaattgttctttttcttggtctgggtgctggttgcatgggtatgttcactttgggaaaattcacattttgcatattgggatactgaggctcagagagaaaaacaattgaatggagagctcacagacagacagatggcagagctgggatcagaacctaaggggttaggttttcggtgaccctgaaaagtagacagtatcagacattcttggattctgtgaaatgcagttgaacctctggtctcccagttgcccttcccacccccacttctgcttcatgcttataacacaaaaccagttttgcaagtgagtcgggctctctcttgcaggtccaaagtctgtgactctgcactttgtgtttcttcccaggcctgaacccagtgaacagaccaacttggaacataggagaaagttttgtttttttgtttttaagagttgaaaggaagaaaattaggccaggcacagtggctcatgcctataatcccggcactttgggaggccaaggtgggtggatcagttgaggtcaggagttctagaccagtctggctacacggcgaaacctcgtctctactaaaaatacaaaaaattacccgggcacagtggcgcacacctgtaatcccagctactcaggaggctgaggcaggagaattgcttgaacctggaaggcagaggttgcagtgaccccagatcgcatcactgcactccagcctgggtgacagagtaagactctgtctcacaaaaaaaaaaaaaaaaaaaaagggccaggctcggtggctcatgcctgtaatcccagcacttcgggaggctgaggcaggtggatcacctgaggtcaggagttcaagaccagcctggccaacatgatgaaatcctgtctctactaaaatacacaaattatctgggcgtggtggcaggcacctgtaatcccagctactcgggaggctgaggcagaagaatcgctggaacccaggaggtggaggttgcagtgagctgagatggcaccattgcactccagcctgggcaacaagagtgaaactccgtctcaaaaatggaagaaagagagaaagagacagagagagagggagggagagagagagggagggagggagggaggaaggaagggaggaagggagggagggaagaagaaaggaaagaaagaaagggaagggaagggaggagggagggagaaaggaaggaaggagagagagagagaaagagagagagagaagagggagggagggagagaaagaaaggagagagagaaaagagggagggagacagagagaaagaatgaaaaaaaaagaaagaaaggagggaaggaggaagagaaagaaagaaagagaggaaagaaagaaaattggatacatgtttgtgtgctgctagaaaactgtgtcatagcataaccaaaactgtcacctcagcaatccctggggagtgagatggggtggggaagcccttctctccctgccccaaggctactgcccttgttcagtaagcaggctgaggccccacacccttctttccggttcctcacctggagtactttccttgatcttaacctgacaacctccttctcaccattcagatctttgttccttccttgaccacctcatccaaagagataccctgtcactgttcataaaatgattgtttttaccgcttccacttctctctctgaaatcactttgtttatttatctactcaatggttgtctgcccctcccatgccccatgcaggcaggaaccaccttgtttcccactgaatcctcagagaaggacaggggacacagagcccacagatgttaggtggtcaatgaatgaggttgggtgttggtggggggctggctttttattttgtacacgtttgtattttgcattattattattattttttgagacagagtcttgctctgtcacccaggctggagtgcaatgctgtgatgtcagctcactacaacctctgcctcccaggttcaaacaattcttgtgcctcagcctcccgagtagctgggattacaggcacctgccaccatgccccactaatttttgtatttttagtagagatggggtttcaccatgttggtcaggctggtctcaaactcctgacctcaagtaatccactggtctcggcctcctaaagtgctggaattacagacgtgagccaccacacccagcctgttattattttttaacaagatggggtctcactttr

SEQ ID NO: 95451 - DNA, 34217 bp, Homo sapiens
cacatttctttccctgaagccttctgtaacctgtcattttccttccttcctcttccggagcctgctgctttctctggacctgtctccacctcccacacagctcatcgtgaacaccacttggtgatggagggagtggacccgtgtgtggtccccaagtgaggccactgggagtttgtccttttcctcctttgcttcactcccagcagcagacccaggttgtcaggacaggagggcctgagctaagcagtaggcatcagtctcgtttgtcttcagacggcgggggcaggtccagggtgaggctgggtggagggctgaccaaggtccaaagggcctgcgcagcctccgggagggcagcttctccagccagaggcttgtgtgagccatcgtgtgctgggctygtttttaagtaagaaacaaggaaatcactccagattctgtcattccaaggaaagggaaggggacagttcaggtttctcagctgttcttaggggtcactgagcgtctacctcctcctccagaggaggctggctcagaacacctagaggagggggccggggatgcaccccccaccagaggctgccttcagcgtctcacgggtgcaggacagcgctcaggcttgggctctaagctctgtgtctagtgtagaacatggggaaggagcatcttaggaactgctgaagtaacttcttactgctctcacaattctaaggaagcgggagaacggcctcctaccaacagcgcccaccccagagctgcctgggaaagggcagttttactgaaaggtgctttactgttcacctgcatctttcagcagctcccctcctgccctcacctggtcttttccctctttatcccaagcctttatgcttgagtcccttccccaggggctgcccacccgacagttccaggcattccctacctgagcttcttgtctgcttttccttctcccactgcaagcggctgcttgtggggcctgggatgagccctctctgtccccaccggccctccttgccaagccattcctgggtgagttcaggcctgcgggagccacacattcatctccacctggacacttgagccgcatggccagacccctcccacctgatgcggtggtgcgtgtgatttgtcaaaagaaagccttctggatgctgttaagatgtacccttcaggtgaacctggtatcagacccacagtacttgctgtttgagaaaaaataaaaacaaaaaggtcacctgttctccagcccttttctcttacctggtatttccttcctttctcctcccccaccccaaataaaaaaacaaaaaacactagaatttatttatatgtattgatgttgtaggtctaggtgaaaaaaaaagaagtaaatgtttcactgctctatttatatataatgtctgaattaattctgtgcaggaaaggccaggaaattgcatgtgaagttcggtgcagtcaccacctgtgtgtgacctgagctgcagtctcttcgctgagatgcaggttttaaatgagacttggggggctgagggcaggcctcaggcctcccagcgccccaacccctccttggtctaatgaaatgcagttcttagtgcagagatgttttaaggtgcaatatatctcttcctttcccgtggttttagagccaagctcaaggtagtaggacgtagggtcttattttgttttcaaacccccatcctcagagcgcagatacatgcagaggcttctgccaggataccacggggccttagtgggaacaggtggagaccagcacttccctttcctgctgctgaggtagggattggggggtcagaacccactcacttttgcctgttaaagttgccctcctgacgctggcagctctgccttggtcactggggatgcggctcgttgctcagccaccagtggccttgcggtattgtccaccatccactagagtgggatgaagtccagagtgtgggtatacatctcagatgcccatctacccactggggacttcaatgccagctgcatttggtttggttttcttaactgttggcttctccccacagcgttttttgtttttttttaaacattcatattgttttcaaacttggaattcatagacactctggctctaggttccttaagggggaaaacaaaagatgactttatttcacattcaagaaaatcagttcagttccaaagctgtggtccttccagccacttctagggacactggggaaccttgttaaacgttgacatcagtgctctccagccgtgctgtcaccctcctatcttctggatctgccttcgggatggtcagtgacagcttctggaagctgagcacacacaggtgcacagccatgctgtggtctggcctgctacggcagcatggcagctctggtggagccttctcccttgccatttggttcccctgtgccaagtagctgcaggctgcccctcaaatcttcatttgtcccttttcacttcctgcagaacaagcctgggttagagggtctgctggaaatggcctttgaagaccaaggataccaggatgtgtgcactctgtcgtgttctgtgatgaatgggaaacgtaggcttccagaaagccagctctcttctgaaatgtgacggacctaagcaggaagtcatccaggacaggagtggctcagtgttggggatggacgctgtcgcccagccatgctccaccagggccaccaatgtgtagttggctggtggtcttcgggcatgtgagacctgctcttcactgtttccaccccacttggtggcctccaggatggtagtggcaccctcagagccccatcttcagcatgttctgaagcctcagagtggaaattcctgctaaggctctgtgtggacgcctttctcccgtgatctaaaggggacactgtactcaagcttttgacctcatgccttgtgtagtaaaaaaggatttgggggttttgtttggttcctgagagggttgtgttttgtttttgtttccttttgtttatgttttggcctttcctctttgtctttccatgtagaccagatatttgaaagggcagacgatggctagaggtgtaatgtgcagcttgtttatacggtattttgggaaacttaccttggatgggaaatcgaatcgtggattcaccaggccggtgctggcacactcaccctcgccctttccctccggttcagtacctattgtttctcctttcaaatatgtgattgtactagctctttccatatgaaagaattctccttatttaaataaaaaaagtttaaaaagataaagctgaacgtgctttctcaggttgtacatccctcgtttcttggtcatttgaccagagagacctacagatcaaagaattctaattttacagagttcacacggaaattaggagtggcacggctgaaatgccttaacagaagctgtgtgggtagagaagggattgaaacccgtggctaagaagcatcttccaaatgcggcagcatcaagcactccactctcttcccacggatggcatctggttgtgcacagtgcctgcctgtggccccgtcacttgccgtgagaaacgagctggtcagaggaggtaagcatttgatgtggcgtgttgtgttgtcacttctagcggtgcttttgcaggaagtggaggaggattatgctgtgctttggggtggggagggagcaagccaggcctggggtagcgaagggtaaaaggtaagaatgggctgaggcagcagttctcggttttgccattgcctcactgacctggggaaagacgtttcaccacctgagtcagtctccttaatcataaaacacagattgtaatggtatcgacctcatggcgtagtgtggattcaaagtcaccagtagcttttagcttagtgcctagaaccagctaagaaaacttataaattacccccaagaaataaaacgctgtttccatgaggaaccccagtccctcaacttccttctaagccttttgactatggaagagagttggggacctggccatgggcatctcagctttaactagccacactcactgccctgatttactgctccctagggacaggtggctcacaaaatctcaaacggagaccagccctgaaagaggctagtcctaaggttgggggcttgcaagatggaggctgtaagtcctgaggcaccaccactgttagcatggcatgaaccaaagcttaacagcccagccccactccctcctggggcccagggaaccctccctgcccactgtaaatacagttgcctgcaggctctggccacaaacccaggtgagccccagctccttgcctctctgtgggatcttgggtgagtcacataacccctcaagggtaagccataaagaagtaaccacgaaattctaactggtgtcatctaatgctatgttgcccaacatggaaaaaaagtcttgcaggcagccaagaaccataatgaaggttattaaacctgcagtgtgcccttttggtctgtatagattaacatacaaatagaccaggagatcaagaaggagcgaggctgagaagagtgatccatcagcctggttgcgttgctgtcagttaccctgctctgggtgccgactgttcagggaaaacatgggaaggggtgcattgacccaaccaaaagtaccatgtctgctccaaagcaggcctttgggaaggctcttgaccctcagcagagggggctggagaggctgatggatgaggaggagccctgggaatggaggaagaagcctccagtcttctgccacggagtttaggggagatgcccccactggagcctctgatggtcatgcagcccccactgatgtccaggtttttttggttttgttttttgttttgagacggtctcactttgtagtccaggctggagtgcagtggtgagaccaaggctcactgcagcctcgacctctctgccccaagtgatctcctgcctcagcctcccttgtagctgggactgcaggcagacgccaaggggccccgctaatttttgtatttttttgtagagacggggtctcgctgtgttgcccaggctctcctggactcaagcgggctcacggatcctcccacctcggccacccaaagtgctggggttacaggcgtgagccaccgcccccggccctaggtccgttttaaatgcccttaccctcagccacttcaccgctagatgtatgtgcaagcaggatcgtggcatcgatgtttttcggcaaggaaactaggagcgcccgcgggcgtgggggcacgtgcctgtggtctcagctgctctggaggccgaggagggaggatcgcttcgggcagagaggtcgaggctgcagcaagccgtggtcctgccactgtactccagcctgggcgacagagcgagaccccgtgtcttaaaaaaaaaattaaggtcggacgcagtggctcacgcctgtaatcccagcactttgggaggccgaggtgggcggatcacttcaggtcaggagttcgagaccagcctggccaacatggtgaaaccctgtctctactacaaatacaaaaattaaccgggcgtggtggcgtgcgccttcaatctcagctactcgggaggctgaggcaggagaatcgcttgaacccgggaagcggaggttgcggtgagccgagatcgcgccattgcactccagcctgggcaacaagagcgaaactccgtctcaaaaaaaaagaaaagaaaagaaaagaaaaaaactaggagcaaactggcgcgcccggcagaacgccgttgtgcagacgcagaattaagatcttcacgccagatggagtgaaaaagcaaggagcagaagatgggtgggagcccactgcgctttttaaaatctgcacgtctgcttagagtacacagaaatcctggcacacaaaacagtagcacccgagagaggggaggtcgccgcgtttcacacctgcctctcctccgggaccggcgccctcgcccgctgcgcacgcgcgtcaccctctcccagtgcgcacgcgcgctgctgcccgtctggccccgcaggctcggtgaatcgaacgttgagcagggcggtgggtggtgcggagtgccgagcggcctcacccccaaccgtcggcccagtcggacggttccgaggcgttgccgggagccgggcgcggctctgtgtggactcggagaaacgcgggtacatttggggacaccggggacgagagcccagcccggacttgggggagtccgtcagtgccggacgcgggtccctggcttgcggacgggctggggccgggggcgtccccgtctttccggagctgggggcggggttcgggcccgggcagatgcggcgttcgggcggccgagccccgaagtaagaactccgtggcgcgtgcagccctagggaggaagggcgtgctgcgggtgcagtctcagggtgaggacggagctggggccgacgcagcctcgggagttggtggacgggacaggtgcggcctgtggggaagaagggccggccagggagatgcggtctgcaaggggagaggaggcactcccaggacagatgggaccttttgggacgaaggcgctcaaggcagatgcagctcagggagggaagggcgcgtccagggtagatggggcctgaggagaccagcggggcgccaacggccagatgcggctttggtgtgagacagggtgtcccaggcctgatgcagcctcaagagaagcggagctcaagggaagatgaagcctggaggagaacgtgggggcgcagggtgcaaatgcaccctccaggcgagaaagggagcacccggggatgatgtgccgctgggatagaaggcagggaggcactgggggcagatgcatccttgaggagagatgaggaggccccgaggctcgkccaggttggggtccctgggctgtaagcagctgagatggcacccaggagctgcccagggtcaggtagctgtggccgcactgtgggcttctggtcgtcggggagggaggggagaaaccctggcgttccttagcagtgttctcgcgcccaagacgtgctcggcaggttttgtggaatgagttgttgaaaggagtgaatgtccagtcctgagatcccctgaattcccacccgagttcactgctagtgcccctcaccccacatgtctacctgaaccaaggctccaggaacttcggtctttctcagcagcccggctgtgctgtggttctcctcgtgtgtccgggagccgggtggctggggatcccttctgtagcctctcgtgagccctcatggaccacggctcctcccttcttttctagggcgtctgcctgagcccgcttttckacaagatgtggggatttttgaagcgccctgtagtggtgacggctgacatcaacttgagccttgtggccctgactgggatggggttactgagccggctgtggcgactcacctacccgcgggctgtggtgtaagctaaatgactccattcccagggtgaatctagaattgtactttgtgacaggaggcgcccttactgaatagcataaatgggagagtgaaatcctggcttcttggtgataggtgtttttggcagtgagaggagagaccagtctgtccccaggacagccccagcagagtacaccttttaggtcttgccttctgagtctgtaacaggtgaaatttggcccattaaaggggtgcagtagaggaaaatctggttgccagccttaagtaacagttttaaagtctggacggcagaggattaatggatttggaagtaagtcttcactgttgagagcactttttagaatgtgtttttgtcataatgggaagtgattgctgttattattgaagggctctttattaactgattaatatgtgtgtgtgtgtgtgtgtgtgtgtgtgtgtgtgtgtgtgtgtgtgtgtttttgagacggagtcttgctgtgtcgcccaggttggagtgcagtggtgccatctcggctcactgcaacctctgcctcctgggttcaagcaattctctgcctcagcctcccgagtagctgagattacaggtgcccgccaccacacccagctaatttttgtatttttagtagagacgggatttcaccatcttggccaggctggtattgaactcctgacctcatgatccacccacctgggtctcccaaagtgttaggattacaggcgtgagccactccgccctgctgcatgttcttttttaactttttattatggaaaacgtcaaacatatacaaaagcagggagacaagtataatgaatgaccccccccacacacaccagtattttcattacccagcttcaccttatcagttcacagccaggcccctccctgcagtggtttttactttgcagcaaatcctagtattcatagataattcagcggtatatctgtaaaagatgaggatttttttttttttttttttggagacatagttttactctgtcgcccaggctgtggtgcaatggtgcgatcgtgattctcctacttcagcctcccgagtacctgggattacaggcacctgccaccacgcctggctcatttttgtatttttagtagagaaggggtttcaccatgttggccaagctgatctcgaactcctgaccttgtgatccacctaccttggcctcccaaagtgctgggattacaggcgtgagccaccgtgcctggctgaggattcttaaaaacaaaaatcacataaccacagttgcattatcatgcctgagaaattgacagcagtttcttggttatcttcacctctccctgattgaaaacatgttattgcagttgattcccacgttttcctttcatacttgcagccgtttcattgggtcatcgctagccacagacatgtgctgctggtgggggcgggggtgggggggttgggtaggtgggtaagcaggattagccttgcgtcccaggaggtctttcagcaggttggctcatagtatccacctaaatcaaacacaagggagagacagaatctgtatgggcaggcatgctgagtgccagctgtgcttggtgaattccccatgtctctgtgggtgggtgatgctgtatgcatcttaatatttggggatgggaaacaattggggcaaaagatccagcctttgctgatcactcactcaaagtcatttggaaacacatacacatttatcctcacagtttttgtttacagttaagattctaattgaatataatatgggttgttgtttttttttctagttttgacgaagtatattatgggcagtacatctctttttacatgaaacaaatcttcttcttggatgacagtgggccgccatttggccacatggtgctggccttgrgaggtaggagtcatcaggagagtagcccctacccttcaggacctcaaatacatttaaaacttatcagtgcatttcttacaggcagaaaccaggtcttattattgatgcatcttgtttattgcttgccacagtactctagaaatatttgctgaatgggatagttactgattaatcttctgtttcaggttatttaggaggattcgatggcaattttttgtggaacagaattggagcaggtaaaagataattttcatttcccttttaatgtgcgcaggttagaatgaagagattgtgacttttgtaaggattaacaactgtggctttttttttcctttcatacctagtcccacagaaactgtgccttattaatctgagtccagaaaataataaattggttggatacaaatgaaagacttctggaaagtctggttaaaatcttactgttcagttgcagtcattatttcagcccttgtcgttggtacacgtatcacagagcgtctgattgtaatgatcggttgtacatgtgaattttgtccattgccacaatgtttttgaaaatagggagggtaggccgggcgcgctggctcacgcctgtaatcctagcactttgggaggctgagacgggtggatcatgaggtcaggagatcgagaccattatggctaacacggtgaaaccccttctctactaaaaatacaaaaattagccgggcgtggtggcgggcgcctgtagtcccagcaactcgggaggctgaggcaggagaagggcgtgaacccgggaggcggagcttgcagtgagatgagatggcgccactgcactccggcctgggggacagagcaagactccgtctcagagaaaaaaaaaaaaagaaaaaagaaaacagggagggtaaatatgtataagtaaggcggtaaattttagaatccttagtcctgtctatgcttcatgagatcaggttccatgactatgcaaagctaatttcaaagccttcacccatagtttatgcactctgctgctgatggggtccccagttttgtaaacgtgcattttagagtctgtgaacatgacggygctatgtgaaagcatagctgcagtacacagagatggtgtgtgcacagtgtagtcagctctgcagtgtggttgcttttccagaatacagtagcaacgtgcctgtgtggtccctgcgcctgctgccagcactcgcgggggccttgtcggtccccatggcctaccagatagtgttggagctccacttttctcattgtgccgccatgggagctgctctgttgatgcttatcggtaagacctgcgcccctgcctgctcttgctgtcatgcagggaagaactgaccctttggcccggaagatcacatgggcttggtgggcgagctgcaccagaaagtgcatctggttcatccaaatttgacgctgcaagtcacccgctcccaggctgaccccgtggttatgggattgctgaattgtgggatcagactcttatcagcagtcggggtatggcagtagaaaactgcccagatgctgctgcaaagtccatgcacacgtgggcacctccatctccaaccaatcttgtgaccaaatgataacttccccttgttccaccacctcccaggccttggccaattgagatggactcgtgagtcagtggatcctcttcagagagggtcttccagctcacgtttatgaacagatgaaattaaagcagatgaaaagttagattaggctgggcgcagtggctcacacctataatcccagcactttgggaggctgaggcgggcagatcacgaggtcaggagtttgagaccagcctggccaacatggtgaaaccctgtctaaaaataacgaaaaatacaaaaaattagctgggtgtggtggcaggtgcctgtaatcccagctacttgggaggctgaggcaggagaattgcttgaacctgggaggtggaggtggcagtgagccaagactgcgccactgcactccagcctgggcaacagagcaagactccatctcaaaaaaaataaataagccgggcacggtggctcacacctgtaatcccagcactttgggaggctgaggcgggtggatcacaaggtcaagagatcgagaccatccgggccaacatggtgaaaccccatctctactaaaaatacaaaaattagctgggcatggtggcacccaccttttgtcccagctactcaggaggctgaggcaggagaatcgcttgaacccgggaggcggaggttgcagtgagccgagattgtaccactgcactccagcctggtgacagaacaagactctgtctcaaaaaaataaataaataaaattagccaggtgtggtggcatgygcctatagtcccagctactcaggagcctgaggcaggaggatcccttgagccctggtggtcaaagctgcagtgagccatgatggtgccactgcactccagcctgggcggcagagcaagaccctgactcaaagaaaagaaagagacagtagaaaatcaaaagagatgtgtattgggtgatgactgtatgaggccttgtgtctayagaatgttttaacattcacaacagccccacacagttgtatcgcttctgaagtaatgccttttttcatgagtgtttttcatcctcatacgttttcccttgctaccttaaaattgacaygtgtttcctctttgaaacagagaatgctctcatcactcagtcaaggctaatgcttttggaatcagtgttaatatttttcaatctattggccgtgttgtcctacctgaagttcttcaactgccaaaagcacaggtatggaaaatggagtgtcttcctagttaacgagaacagagattctgggtggtttgttgatctgagatggtccagtacctttttttgtttcgttttgtgagacagtaccttttcattttgaggagttgcttgctaaatatctttttttttgagacggagtccctgtcacccaggctggagtgtaatggcgcaatctcggctcactgcaacctccgcttcccaggttcaagcaattctccagcctcagtctcccgagtagctgagattacaggcacacagcaccatgtctggctaattttagtatttttagtggagacggggtttcaccatattggccaggctggtctcaaactcctgacctcaggtgatctacccgtcttggcctcccaaagtgtggggattacaggtgtgagcctctgcgcctagtgctagatatcttttggtcctctaatattttgggggttggcccttggcttgtgacttcataaatacatcttcatttttctataatttaaactaacaggacaacattttctgggcaaaaagaaaaattctgctgggatggatactttgggagatgggaattctttcttactgcccctgtggctcagcatggccagccgacccagaaagatttctctgaagaatgtggagcttcactagccttttggaaatgtgtctgaactatttctgtctccatctgctttgtttttattccagccctttttctctgagctggtggttctggctaacactgacaggggtcgcttgttcctgtgcagtggggtgagtttgagcctctggtcttgggcagtgtcctcctccatctccttatgttttcctgtctcatgttaactccatttctgtcatgtctttgcagcatcaagtacatgggtgtgttcacgtacgtgctcgtgctgggtgttgcagctgtccatgcctggcacctgcttggagaccagactttgtccaatgtaggtgctgatgtccagkgctgcatgaggccggcctgtrtggggcagatgyrgatgtcacagggggtacttggtgaaaagactccaatcctcaatgttttagaagcaggcaggcctgggcagcctcgcctcttggcctctgcaggtgcctctgtatgggaggccagagtttctgtcactaactttttctaagctcacaatgtctagaggtgggtrcgcttttccacgcagtggaacatgacttttctttgaatctctggcaggtctgtgtgttctgtcacttgctcgcccgagcagtggctttgctggtcatcccggtcgtcctgtacttactgttcttctacgtccacttgattctagtcttccgctctgggccccacgaccaaatcatgtccagtgccttcyaggccagcttagaggtaagtaagcagtgggcatcgtggccactggagaaggaagatgatagtggacccagagttttcttacaaacacatcaagtgaacattagcacttgaatcaaaacatgaagaatccacatccatatttctttttttggtgggggggatggagtcttactctgtcacccaaactccacctcctggcttcaagcgattctcctacctcagcctcccaagtagctggtattacaagcacctgcaaccacacccagctaatttttttgttttgttggtagagatggggtttcaccatgttggtcagtctggtctggaactcctgacctcaagtgatccgcctgcctcggcctctcaaagtgctgggattataggcgtgagccaccgcgcctggcagctgggagcattttaaagtcaagtcttacaaaccctgggcagtttcacccgccttaaggaccacactcaactgtgaccttcattcctatgaacctcgcagcagtggtagaaggtatcagtagaggtggtcaggactgtggttcctgaagtcagccaagcctgccgacggccagtgctgtagtgctgtgtgtttcagcaagttgtttggctcaccctagtcttggttttctcaactcttagacagacatcatcattgctcttacctcattggatgcttgtaaggactgaatagggtgcgcgtggaaggctgaactgagtgcctggcccagaggcagcatttgatcagacttagtgctcattatggttctataatgtaacgtgatgtgattaaatgggagatcattaccactgttacaagaatggccaccagcctaaacatcaccccagagggaggagtggccatcggraaggctggcttagggkcatttttctttctgtctctcactcatcaaccttctgcttctgtctcagggaggactagctcggatcacycagggtcagccactggaggtggcctttgggtcccagrtcactctgaggaacgtctttgggaaacctgtgccctgctggcttcattcccaccaggacacctaccccatgatgtaaggtgatggttttactttgaagataattaaatgctttatttgctcrtagatttgcttatcttagcaactttccctttctttgaggaagtttgtttgcaggacagaaagaagttgagcagcccgggtgctgattgccagtgagcttcgtggttcccgggtgttgctggagggacttggcgtatggcagggcccagggtcggccccagctctgtggctgtggctgacctcagcactgcctgcctraatcatctgatttcggctccttgtctgtggtaycttcattttccctgaaaccccttgctaggttgtatttgttgaaatctgcttccctttgcagaaactttaggagaaaggcgtgtgggcccgatcgatgacccacttccagatacgtttctttycctttcttttctttttctcataaatagacacagggtctcactatgttgcccaggctggtstcaaactcctrggctcaagcagttatcctacctcagcctcccaaagtgctctgattacaggcctgagccaccgcgcctggcccagatacatctctttgttgacttcacacagatatgagaacggccgaggcagctcccaccagcaacaggtgacctgttaccccttcaaagaygtcaataactggtggattgtaaaggatcccaggaggtgagtgcaggtcctrtgactccagagcagagctcacctcctggcctggccaggcgagaccctgggatgcagtcctgggcccccttctttccctccctcactgactctagtcaccgtcatggccttgaacaccagctcagtgctgagtccaaggtcagaggaatagatcatgagaccctcagtgagcagcctgctcagtagctgctctgagaagtttccaggcgagcctcaatgccccgacctgtgtccctctcccttcctcataaaaacaagaacccccctcctgcaaaagtagcatcatcttgcacacatcccagctagaggtgccccttgctctcattcccatatccagtcctgtggattctgcccccaaacaaggtctctagctgtcccggtcactgtctcctgatggtgtcctcccattgctgcctgcccagctccagcacctgcagcccgagtgggctttttcttttttttcttcttattttttcggggkacagagtcccaccctgttgcccaggctggagtgcagtggtacgatctcggctcactgcaacctccgcttcccgggttcaagcgattctcctgcctcagcctcccgagtagataagattacaggcgcccaccaccacatcctggtaatttttgtatttttagtagagacggggtttcaccatgttggccaggctggtcttgaactcctgacatcaagtggtccacccagctcagcctcccaaagtgctgggattgcaggcgtgagccaccacgcccggccccctcatacactttcattggtggaatgcccttcagaaggattcccttggcagtcatggtacatttgtcactgtagtgtttgtagacaaattcagagcaatgcaggtgtgatgaccgcgggtagaatcacattcggaaaatgacctttgatttcagaaaagagcccaattaatgtctgtgctttggtttcctgtgttcacctcatgtgaggcacacatgggttgggaggcagtctcagccatgagaattcagagctgtgcccctccggtgcagctgttagttcgaggggaccaggctctgtgtggtcccgacagcactgtgtcttccaggcacyagctggtggtgagcagccctccgagacctgtgaggcayggggacatggtgcagctggtccacggcatgaccacccgctccctgaacacgtgagtgtgcccgccgtctgctctgctgcacctgtgggtttcctctgtggttctctgttcagaccaaaacgtgagccctgccttgggccgctgccccctgtctacccatcatctgcatgtgtagcagctcttagacctacatttgatgccgggaggggacccaggcctggccgcrgaagggagcggggttaagaggaagcaggggctctgtgaggactggacagaagcacctagcacagcccatcctaggagagctcagggccccgtggatgagtgtacaaggacaggctgggaatgttgacccgctttctatgcagagaatggagtttgggcacacctccttaaagtggtmaagcttaaagtatgagtgagtccaagaagcctggaagctcgggcacgagtggagccgtgaaggcttcttccttctcagtccttcgtccttgtccgacttgccttcccgtggtgctgggcacagttgctcacaccctcctccttcctccctgactgctctctccaccgcctccttttcctctgttgctctcagtctctgagggccctccggccttgctgcctctgcacaggcccagtcccggggctacctctcctggacttccacccggctgcccggggctcacctccagctctccacgactcccagctccacaggggcggtctctggccctggcttttctggttctccctggaaagggcccagtagctgaggcatcacctgactccttcccctcccctcccattgcatgttgattccattgggagatcctgtttctcaaccttcagaaccagccctgggtaggggtccttccttctccctctactcccacctcctggggcctgacctctctacctcgcagcagcctgtccggcctgcggaccgtgcacaacccacttgcgttgttcctctgtgctcagtgactcccgtcacccgccaaggtccctggtgaccctgacacacttcacccccgccaccctggctccccccagccctgaaacaaccacctgcgggccccttgggggcttcacacttgctccctctgcgagaatgttcttggacttggctcccccatggcccctctatgtaggggtctgctgggatgtcactgcatccaaaagtgcctcctgggtgctgtcccycaccatttgttttattagtggcactcctacaggtgcacgctctgcccaccggcatgatggctgtttcccagagggctgtgagggccttgtcttgttcacagctgggtggctgctcctagacagtgccaggtgcatggtgcggtaccacatggttactgagtgtgtggattaagaggaagtgggtgttcctgaccgggcgtgctggctcacacctgtaatcccagcactttgggaggccaaggtgggcagatcatttgaggtcaggagttggagacaagctgggccaacatggtgaaaccccgtctctactaaaaatacaaaaattagccaggcatggtggcatgtgcctgtaatcccagctagacaggaggctgaggcaggagaatcgcttgaacccaggaggcagagattgcagtgagctgagatcgcgccatttgcactccagcctgggtgacagagtgagactccatctcaaaacaaaaaagaagtgggtgttcgttaacattgaggttgatagccttttctcccagcttatctgctgcgtccccaggccagctgggcgcaggggcgggcagctcagccctgcaagttgtagcattggtactgccagctggcatcgcagcagtaccggatcgggcctgggcgcacggttccttcctctgaaacttggttcgctcgtctaacaggtggaaggttccacagcagagtgtccttttcttttggagatgttcccacagggcctcctgcctgtttagtgtccactcccatcgccgagcctcaagacctccgtcctcagtagcagcaactcatgggactgggccaccccttatggctgagccggctttgtttctgaaaagcaaccttttcctgcctgaaagatttagtaattgccttccagaggagttcaaggaattttctgaaatctcggtcttggttttccaggcatgatgttgcagcccccctgagcccccattcacaggaggtctcctgctacattgamtataacatctccatgcccgcccagaacctctggagactggtgagtaaggctgcggctatagcagccacaaccgtcagtaatgaacactccctcacacggagcacttcctcacccggagcactccctaacacagagcacttcctaacagaacacttcatcacacggagcacttcctctaacacggagcacttcctctaacacaggacacttcctcacacggaacacttcctcacacggagcacttcctgtaacaggacacttcctcacacggagcacttcctctaacayggagcacttcctgtmacacaggacacttcctcacacggagcacttcctctaacacaggacacttcctcacacggagcacttcctcacagggagcactttctctaacacaggacacttcctcacatggagcacttcctcacatggagcacttcctcacagggagcacttcctcacacggaacacttcctctaacacaggacacttcctctcacactcacacggagcacttcctctaacacaggacacttcctcacacggagcacttcctcacacggagcacttcctctaacacaggacacttcctcacacggagcacttcctcacatggagcacttcctcacagggagcacttcctcacacggaacacttcctctaacacaggacactctcacactcacacggagcacttcctctaacacaggacacttcctcacacagagcacttcctcacacggagcacttcctcacacggaacacttcctcacacggaacacttcctcacacggaacacctcctcacacggaacacttcctcacacggagcacttcctcacacggaacacctcctcacacggagcacttcctcacacggagcacttcctcwmacrgaacacytcctcacacggagcacttcctcacagggagcactccatcacacggagcacttgctcacacggagcacttcctgacatggaatgtttgaaactgccattgagaataatcatttttcctttttttcagtttacccagttgaggttggatatttagaataattctgattcagatgtaaagttacataagttttattcgtacataaagtcacagatgttttcacagggaaccgatgcgtcttccttggtggaactggggaacctggtggtttcctgcatcagaggcctgtgttcactgagattctaaatgctttgtgtttgctccatgttgggtgccaggtgcgcttgaggctctgccaggtgaaagttctcccaacctgtttagcctcaggagcaggtcctgaacacaggacacgagctccagccacccctctgccaccatgatccaggagaaattccatttctcaggatttccctggggacaggcttagccgtgagtgcgggggatgttcctgaggcgctgggtctgtggtcacctttccttccagcgaccagggccacctgctccccttacggaatcgggtctcctgggaaaggttccataaaaagtcttctgttactggaccatgttgccatctgaatctaaggacatggacactaaatgcagcccagccccatgaccacagtgaaggcactgggcttatttccatagtgaggtcacacccccccttctagcttcccactggcttcagcgctttctgcctacgcaggctcagccctgtttcgcttgacagagttagcaccacgtcctcatggccagccctcacagcaaagccaggtatctgctgatgttcttttttttttttttgcgactgggtctcactctgtcacccaggctgaagtgcagtggcgtgatcttggcttactgcagtgttggcctcccaagcttaggtgatcctcccacctctgcctcttggtattacaggttagccaccatgcctggcccctgttaattttgaatatttaatttttaaaatattttttctattccaggacagtctgatttttaaaatttttggtagagatggggtcttgctatgttgtccaggctggtcttgaactcctggactcaagccgtcctcttacctcagcctcccagagttgctgggatgacaagtgtgagccactgctccagattggctgttccatttttgtgcagagtgcgcccctctgccccactcgccgtctctgtgctctgcatatctgtgtgcgttctgcatttccatccccgcccccccacagtccttccctgacgtgagtgctgtgccccttctcacgggcacccttctctgtcctttctgatggcccctttggcaccaggagcccacatttcaggtgtctgaagttcatagaacaaggaaggagggagcatgcgtgaggtgtgcgcgcccggcctgcggcatggaccgcggccaggcctcctcatgcctgctcctgcctagcttcttgggttctctggttgtgacagtatgggaaaatgacagtcatgtgatgtcatggggtcattgtgaggctccagtatgtcaggctgtgacaaggcaaagtgcctttcagatgttagttgtcttttttattactcgatgcgaggaaatctctaagctgtgtctggcagggacagtgtctggccttcatctgagctgtctgcgagtcctgccagatagggactgagacttgctcactttttggccagggctctgagccctatgaataggctttgcagagaggcacgaagaacatcaggctttgtattttctgtgaggaggcctcttgtacggccttggcgaggaggagggtgcacttccccagcgaccctcggagcagcccggggtgctgtgggcattgggaaggaaggccagtaccagccccttatagcttccctcacttggggacttgtccctttgtctcaggctcaagtcagtatcattgtttggtgayaggtctttatttttacattgaaggaaatttgaaaaggaatgaaataatccttgagatgtctttttgcaggarattgtgaacagaggatctgacacagacgtctggaagaccatcctctcagaggtccgctttgtgcacgtgaacacttccgctgtcttaaaggtaaggacactgtccgtggcttggcctgtcctgagctgtgggctccagtctgtttcccaagcccctcaggcttcaccgcctctctgcaggcggaacgcttcatttgagtcatcatggcttcctcttacactgagggagggcggcttttgtaacttctcaggatggaatcccaatgtgaatctcccacaaggggcacctgctgacagcgtgacccgggcaggggttccccttccaacccragtggacacgggagccacggccttcccatcacgccctttactctcctgcggtgtcaccagctgagcggggctcacctccctgactgggggtatcggcaactggagatcgtcggggagaagctgtcccggggctaccacgggagcacggtgtggaacgtggaggagcaccgatayggcgcgagtgagtccgcggcgtggcttccgccgctcctggaatgtactttcagctgctcaatatttgataacaccccagagttctcattttggtgggaagggaactgagcacattctccatgctcggtggcaggtcatctccctccctgcaccctgcactcagctgctgcagtaataactcaagacgcttcttccgaggtgtcgctggaaggcaaccagtttatccccgtgcaagtggagctttctcagggtcgaaatcacctcatttgaccrgrcagtcttgggtgtggtggggaaagctaagtggartgatgcggttcgataaggggtctttgttagaaaggcaggaagccagctttttgctgcactgacagcttctgctctgagctcttgaccttgtgctacttctatctgttatgcccttgtctgttctgccaggccaggagcagagggagcgggaacgggagctgcactcacctgcgcaggtggacgtcagcaggaacctcagcttcatggcgagattctcggagctgcaggtgaggagcggccaggggaagctggcctagctcgctgagcattgactcctcagcagggaggcctgggggctgcacaggactcaaaccagagtcaggctttgacgctggagctacaggctcacaacagaatgagtgtctcctctctccagtgtaagggactgtgtgtgacacccctggcccacaccttgtggccctgtggtcaggaataatagggacccaggaggttctgcaacatcgccagggtgtcttaaggcccccaggcagcgaaatgggccacactcaacagagcccaagagaagtcacaatcagaaactcacggtcacaaatctgaacgtgaccttagagagcattcagcccaatcacttcgtctacagaggaggtaactggagcacatagggtggggcgaccctcccaaggccacattcagggctggaatccaggttctcatcatgctgcctccgatgcatgatccgaatgaacttgagctgggccagtccacgtgcaaggggcagcagtgtactcctttgaccaaatccacgcacagcgggaggcatcccccatcctcaatctcagaggcctctgctttgttccagtggaggatgctggcgctgagaagtgatgactcggaacacaagtacagctccagcccactggagtgggtcaccctggacaccaatattgcctactggctgcaccccagraccagcgtaagcgagcgatgctgacagctgacagtcatagattcatcctgtttsttgagaattccttgcattaagagcagccgctgcaccctagaaagtgctgggtttctccmaagcttttcctgacaaaggcctgtgacttggttttctctaaacgctttggcaacctggagccaggagtaggggtgtggcatgtgtgcctgttgaaggaaacccggcttgattgcttttgtggagacacattgttccccttttcctggcgaaagtggttttaagatattcccattcaattttccgtgtggcacctggtggtggagcttaccggtgctttgctgatgtgcgtgccgtctctccacccggcagagtgaaagcattggtaggccgggcacacagtcagcgccccataaatattcactgaatgggcagacgctggaaatgcccacctttttcctcctccctcagaggcgggtaggtcggctcagcatgtgcactgaaggcagaggctcaggcccagaggccgccccaccccgagctctgagcgcactttgcattctcctccgtggacagtgctgctgttacaaagtggagtcatctgctcccaattttcagtttccaattacaaaattgagagcatcagtgctgtgtgtgtgtgtgtatgtgagagagaaagagagagacggagtcttgctctgtcatccaggctggagtacagtggcgtgatcttggctcactgcaacctccacctcccaggttcaagcagttctcctgcctcagcctccaagtagctggtattacaggtgcccaccgcaatgcccagctgatttttgtactttttaatagagacggggtttcgccacgttgggcaggctggtctcaaactcctgacttcaggtgatctgcccacctcagcttcccaaagtgctgggattacaggcatgtgccaccacacccggctggcatcagtgcttttaatgaaaggtctgagtaggagcagacctgtccacagtagtagtaaggcctagtggatgctaggctgtgcctggcgttttttcactctgctaaagtagtgcgtgcatctgaattcctttcctgtgttctcttctcttccctccctgagcagagggcaggtggctaacagcatctcccatgttcccttaggctcagatccacctacttggaaacatagtgatctgggtttcgggcagcctcgctctggccatctacgccctgctgtccttgtggtacctgctccgacggcgaagaaatgtccatgacctccctcagggttagtacctctcccacatggctttctttctttttaatatagacatggggtcttgctrtgttgtccagggtgttcttgaactcctgggcttaagcgatcctcctgcctcggcctcccatagtgctaggattacaggtgtgcgctgagcattcaccgcctcaagtgacaaaccgacttcataggaacctaccccttaaggcggcctctttgtttctgtattgtggaatcttaaattatgtttgtctcccaagagacaaaatgttaagttcccatgttgcgttagaggtgtctccagtcgagtgcagcgtattgggcaggaattgcccccttggtcccatgttgcccgtatgcgctggaaatggctgggtaacacaggcagccaggccgggcgcggtggcttacacctgtaatcccagcactttgggaggccaaagtgagggagtcacctgaggccaggagttcaaaaccagcctgggcaacatagtaagaaccctctctctaaaaaagcaaaagagagagaagacccrgcctgtgggagcagcagagtyggtgtagctcgagccctttcmtatagatgcctggctgcgctgggtgctggctggggygctgtgtgccggtggctgggcagtgaactacctcccgttcttcctgatggagaagacactcttcctctaccactacctgcccgcactcaccttccaaatccttctgctccctgtggtcctgcagcacatcagcgaccacctgtgcaggtacgggggctgyggagacagtggctggaccgggcagcagccctctgctgggaagcccatgcgcagcaaacacatggggtgcagcgaacctcacccatttcacgttacactgacatcctccgggtccctccggggaatgggtgaggttcagaagagatgcccagatgaggcactgcaggaacccagagggagaagtcgcggctgacagagatgaaagcggagtgggtggggagacggggaggggatgaagagatgtgggtggcctggaggattcgggagcagggagcaaggcccaggagcctggggtgtcagaaacggcagctggttatggtcgggttgtgtggtgtggtggagagaacccaagaaagcttctaaaccagagtgtgtttggaggttggagcagagggcgagggcctcccggtttcaggaagccacacaagggaggaccgtgggtttgggaccagtcctctggcatctgtgtggaggtggcccagccactgtggaggcctgaggagtcatcagggggcccctctcagtgcatccaggtgggagatggtcatgggtggcaggagacaagacacagaaacctgaaggcagaaccccaggcctcggggggtgaccgtgtggacagcagatgtcaagagggtgccgggcagggaagccgcagtggtcagccaccctcccccacgctgctctgacctctgcaggtcccagctccagaggagcatcttcagcgccctggtggtggcctggtactcctccgcgtgccacgtgtccaacacgctgcgcccactcacctacggggacaagtcactctcgccacatgaactcaaggcccttcgctggaaagacagctgggacatcttgatccgaaaacactagaacaagagtgtggcaaagaacacccgtgctggggtcgggaygaggttgaagggtcttggtcaatgtacgtaatgagcagggtgggccccacgctgggaggacacgggctgggctgagcagggcctctagtggaacacatgggggtctcattgaaaagctctctgatgagcacctccttttgtgcaaagttaattttttctcgacaataaagatattccgtgtcttyacccctgaactaagacacagggagtatttcagaggccagcgtaggagtcatcgacaacraaaagccgagaacccagggccagcagtggagcctcagcagaccagggcctggtccttgctaattgctgcagggtggagtttgatctggcagacccgatcctccttcatgaacacccagcaacctgagcaagtcccrgccctgccctcagcgagcccggcaggcgtccygggacagctcagtgttggagggccacctgaaccacgagccagggctggggcttgcatgtcattgtctatgacagcgtcaagactggcccttggcaccgtgctgtgtggaaaccctcccctctgagactccactgagacgtggctgagtgaaatyttcctcgtcagtggtcaaggtgtgtcatccatacagctccatgcctttgtcttttttaaatgtaattaaaaaaggaaccaactggcgtttgtagttggkgtttgttatttattgattctccctccaaaggggcctaagctcgacaaaaccgttacagttgtcagaacccagccacagggctcagcccccttcccccacgtcacgtctgcatcactactgtgggtgagcctggacggacgggggctggggctgcccrtggcagcggcaagggatgctttccagagacagccaccackcaggagggaggatcaccccaggcaacccagacacgggtgttcacatgtgaggctgtgagctccacatagcacaaargaggcttgctgactttgggcggccatgtctgctgggacctgggtgatccagtgcgtgccacagccagaagcaccattccctgcatatggccactagccaccctggggtgggacagcctgtctagacagacagcaccttgggggctcccctgagggtcagtgagggcctgaccccaggcaggactgcgtggacgctgttctccagccgggacagacctggcctccgctgccttctgccctactgcatgggctcccagcctggccccgcacaagcctgggtgtgatgctgggtgcttccagggcatccgcctcgcttctctgcctttaaggcacaagcaaggggggaaaacatccctcagtggctccccatatccgtgtaggccacgctggactgcaaaccactgggtcatgaaattaggtttgtaggccacaaccagccttgtgttatgaaacagaaaacagaaaacatgaggacatgtaacatgtaaaaaaggaaagtacttgttcacaaaacttttgagttatgtgtgtgagtgtgtaagaaccagatcagactggaaaaaactctctcccactgtgggttcactgtcaacaaaacatcaggccagccagtgtctaggctgtctcctcaatttccccaataatgtgcctcacattcctcacagaagcctcccaggcttcctgcacattctgtggcatttctcagtgacctagagggatctttaaaccgcaacgagcctaagtggctgaaaacctcaggaacgcctgtcagtgtcccagcaagttgagtctgagtgacacatctgagtttccactcctgagtgaggaaggcctcgctgctaacactcccctggggtgcgccgagaggaagcagtgggtgtgggtgggcgtccccaggctcagtccctgaacacacatgccgggcgggagacctgccctgaggctcggcagcccctcagtggggtctgctgctggactccaaatgtgaccgtttgccagaggtcrgcatcccagggtggtcccctggctcagaaaaggtccgcttgtagctccgcccattggaccctcctcggtgccatttgcagatgtcaccattcagaatgtcctggatgtgctgcacgatcaggttgatggcaactgcgccaagagacagacaagcagcgggttagccgcatccatcctccgtggagaccgcccctccccgcagcactcggccaggagtgagcgcccaacctctgccctgaggcacagcctgcggcgaggggcatcgagtcaaatctcagcagacagaaacatgcatcaggacacagcaaaataagacttcttagcttggtcttccaggaatttatgttagagtctgcttaaagtactttctgctaacagatttgaatatacatatatatatgttttaagaaacaggttcttactttactgcctaggctggagtgcagtggcccaatcacagctcactgcagcctcaacctcccaggctcaagcaatcctcccacctcagcctcctgagtagctgggaccagaggcacatgccaccatgcccaaataattttattttttgtagagatggggttttgctatgttccccaggctgttgaactcctgggctccagtgatccccctgcctcagcctcccaaagtgctgggattaccagtgtgagccaccgcgcccagctacatacatttttaagcatattttaaccctgtgccgcagatcaacactggcaggccgcgtgcgcaggggagtgctcagtaactgcacactggtggaactgtccctgcctcaagctctgggaggggcggggggacagcccagcaggccagcttcttacccatattgtccactcctcgcgggatgatcacatcggcatacttctttgtctgtaaggcacaagggggggtgttcctgtgaggacttttccttcaaaggtgattttaagatgctcagaaacagatgcaacagcaggaggggcggccctggggtgctcagaggtgctggtgtcatcggcaaatgggggacacagactcagtcatcagccaggtgtgagaggccatgatccaagaagtgaggcagaaagtgcagctgaggcagccaaaagaaagtgcctcttccagtgtccccattccatcacagaagacagcccccttccagtgttcccactccattacaggagacagctggctacgctaacgactcaattcactgggccaagctaagtgtggcacttctacaaagtgtgacattgttcctctggaatcatgaagcttctgcaaataccctggcacagcaacaggacagccgccgccgtgcataattactgcaggcagagacgctgatggtaacttactccctcatccaaccactcattggctcaatgctgactctcattccctgtcagatgctctgctgctgaggaaggacaaggatggagatatatcaggaaatgcagggctgctggggagggtccgcagccagatggtgggggttggggggtggctttagggaaggggaagcagcctggagaacatggctgaatcagacaaagctgagggaagagggagggcagggtctgggccgaaggacggaacttggaacggtgcgtgctgctggcgtgtggatttgggtcaagaaggcggcagaagagacaagctgcaagaggcagacagggaccaagtcctggggacagctgtgtctgcagttggtgggaccccatctcatgaaagcacgagcgcaagggcgagggctgctttctattctagtctgatagtctgacgggctggaggagtccgggagagctgacaggggtcttaaccgccagcagggatgggcctgaatacagttgggaaatacctacggggtccaggcagaggactgcacaagccactcaacatgaaggtgaaggaaaaggaggctcaagaacggctctgggtggggctggggccgggtgcggtggctcacgccggtgatcccagcactttgggaggctgaggtgggtggactgcttgaggccaggagtttgagaccagcccagccaacatggcaaaaccccgtctgtgcaaaaaaaaaaaaaaaggaaaaattagccaggcgtggtggtgcgtgcctgtagtctctggctactcaggagcctgaggtgggaggatcacttgagagtggaaggtggaggctgcagtgaagcaagatctcaccactgcacttgggcctgggtggcagagggagaccctgtctcaaaaaacaagcaagcaaacaaaccaaccaaaaacatctctggggcctgggcccaggacatagcaggtgacagcacttcctctactcaggtcgctgaggcagatttgatatccagagttttactgcgaatcacctactttttgccaaatatctttctgtgaatgagagactaaaacaagttaactttacttttaaaattatattttagaaatttcagacagcatgaatgcaaaaaaaaacaaaagttttctttatatagcagccaataggccaggcatagtggctcacacctgtaatctcagcactttgggaagctgaggtgggaggaccactagatcccaggagatggagaccagcctgggcaacacagggagaccccatctctacaaaaaatttaaaaattaaccgagcatggtggtgcacgcctgtgggcccagctactcgggttgctgaggtggaaggatcgcttgagcttaggaggtcaagactgcagtgagctgtgattgcaccactgtactccagcctgggcaacagagcaagactctgcctcattaaaaataaaatttaaaaaaaggccaggcacagtggctcaatcccagcattttgggaggccaaagtgggtgggtcacttgagtccaggagttcgagaccagcccagccaacatggcaaaaccccatctccactaaaaatacaaaaattagctgggtgtggtggcgtacgcctgtaatcccagctactcggaagggtgagacaggagaattgcttaaacttgggaggtggagtttggagtgagccgagatcgtgccattgcactccaccctagacgacaaaaagagaccctatctcaaaaaaaaaaaaagcagcagatagaacttacttgtcctacattatcaaaggcaggaatcttggtttcagttcctttgtgctgtatttttaccttaacaggcaaaatgttcccgtgcaaaacactcccatttgagtagagccacgagtcccaccaagccagaaacacaagatggagaaatggagaaaagacaggtgggtgtgcagcggggagttcctgctctctgcgagccagctgggatctgggcacagcgctcactccaagatttcagagcactggcccagagcagcctggggtcacagaccctggaggagcagctctgaagcaccttctgagggccagatcccggccttggcagtgaacagactaaagtgctcctgggcttccccactctgcggggaataagcacccaggacgtgtcagatgatggtaagtgccccggaaaaaggaagcaggcagagaggctggcgctgggtgcagagggttttcagtgttgaatggggacgctgggcaagggcctgaggcagggaggaagcggccagtgtgaatgtgggggagatatggggcttttttaggcagagggaggagcaggcacagagaatgtttttacagctgagaactactcccagggtatgtggccgtaatgagccaaattcttctcctttttttcaatcagatcactgtcacccagcactaagccctctcacagtactgggtcccatgtgtccttgtgaaaggggaaaatgggctctgaagcagcgagcacaggtaccggcaggcagaactcctcgaaggccggcttcacgaaggtggtgtactgcgtcagaatctgctccaggtccctccctcggcgcacgtcccggagaactgcagcggcaaggggcaggcgtgcttcagacctcaggacctgccgccagcctcggccaggcaggcacggaggcccgcggccgccttacctcttcgagacagcctgacgtcggagtcggtgtccacgaagaggcgcaggtggaacatgtcccggatctcctggctgtagaacaccaagatgccctcaaacagaaccacgtccgcagggtagaccaccgtggtctctggtaacctgaggggcgcacggggaaaggggctctgctgcagacacagggtctccaggccacacacacagtcagcttccattgcagggacactgactgtgggaaggggtgggggacccacagaaaccaaccggcggaggcctgccgccaggcaggtctgtgtgagcccgaggggacgtcctagctggcccctctcctcggccctccctagaaccacctgcttaccttgagtgtgtcacaaaatcataggtcggcacctccaccgttttgccctccacgatgttcttcagagtcctgtgcatcaaatcattatcaaaggcatctgcagggttggagacaaaggcaagacaggcagatgccctcgtgcagcggacagcagggaaccctctctgctctggggtcagcacagctgggtgctggggacaccgagaaccctagcacaggtagactaggactacggcagtgtatgtttggtagcaacagtgccctctgcagccctgcagaccacaggatgaccctgtccttgctgttctcgggctgtgccactgcccaagctctgtgcccctgagatgccggaacacaggggttttctgatcagctcttcctgggaggtgggtaggctgggcctctgcttctctctctttctgggactaactggttagactgcggctttgcaggccttcttcccacaagtccttgggaaaaggctgaccatgccagccagccagggtggaatcttctagcagtggcaggtgtctccctgccacatctgcccgtttacctggcccggagcttcaagccaccagcactagtttacctaccgcctcccacactggcctctctgaggactttgccccaaagcacgggagggcacagtgggcagaggtgtgtgtggagggccctaaaggccccaacgtgggaagggaagatgggaggatttctccaggatcacagttgtggcagggcagggcagggctccccacagtgcaacaggcttcctgactggctccaaccacgctcctggggggacactcagggcccagagaactcagcaaagttcccctgacttcactgtgcagccaactccactgcaggctgcgtggcgagttgggggaacagcccaagcgggtctgcatccatccaaccttgggcccaagcgcagctggttagcggccgcccagaatggggtctgccctccccacatcgttgggctcgcgatttacctggatggtcaaaattgtactgtcctttcaaggccttggccttctgctctgccgtcaggaccttgtagaacctgtcctggctcaggatgaccaccttccgctgccgctgttccacctcgttctgtcccagcaactccatgatcttctcacacacggtcgactggagacacagaagcgggattcccgcctggaaccgctcgtcctgtgacaggcacggggccggcttctggagacactgacccacccgccccctgggggttatgctcggaaggcgggaggacaccaacaggtgtggatggtctcagcggaagggccgcgggggcccaacggggttagcacggacttggggctccgaggagcccggccggcggagaggctgtgggggagccccgaggcccagcgccccaacccctcgcccgccccagcccgccccggcccatcgcggcctgcagccccttcgctcccgcgccctgcccctgcctggcagggggcccctcggccggggctggggtctcctctctggaccgggccgcccgtaggcaccggcgagaggcgagaccccggcccgctcggccccttaccttcccgctggcagtgccgccgctcacccctatcaggaagggccgctggtgcggacggtcggcct

SEQ ID NO: 95452 - DNA, 19472 bp, Homo sapiens
  misc_feature (1)...(19472): n = A,T,C or G
ctgtcaggtcttcaaacactttaatagactatatatgtgtgtgtatatatatattttgttgttgttgttttgttttgttttgtttttgttgttgtttttttgagatggagtttcactcttgttgcccaggctggagtgcagtggtgtgatctcggctcactgcaatctccacgtcctgggttcaagcgattctctagcctaaacccccgagtagctgggattacaggcatgtgccatgacactcagctaatttttggtgtttcagaagagacgaggtttcaccatgttggccaggctggtctcaaactgctgacctcaagtggtccacccacctcagcctcccaaactgctgggattacaggcatgagccaccatgcctgaccaacagacttatttttaagtccttttcaaatggaatcatttgtatcttctcagatgtgatttcatcactagtcgacacctgttgactgttctacaagggggcagatttccccctctttgtaatttttgtctgtgagttcatcttcagcaggcattgtcttctaaaagcatcctgcacgtgccatgttggtgccctggaatatcagagtttcgcatttgtctctgtgaggggttcctatgtgtgcaccagttgtggctggcctatttttcttttcttaagacagagtctctgtcacccaggttggagtgcagtgatgccatcatagctcactgcagccttgaactcctgggcttgagcaaccctcccacctcagcctccctagtaactgggactataagtatgtgccaccaccaccacacctagctggttttttgtttgtttgtttgttttttgttttgttttgttttgctggccaggcacggtagctcacacctgtaatcccaccactttgggaggccgaggtgggcagatcacctgaggtcaggagtttgagaccaacctggccaacatgtcaaaaccctgtctctactaaaaatacaaaacttagccgggcatggtagagcatgcctgtaatcccagctacttgggagtctgaggcaggagaatcgcttgaacccgggaggcggaggttgcagtgagctgagattgcaccactgcactccagcctcggtgacacagtgacactccatctcaaaaaaaagaaagacagggtctcactatgttgcccaggctggtcttgaactcttggcctcaagcaatcctcccacctcagcctcccaaaatgctgggattacaggtgtgcgccaccatgcctggtctgaaccatttttatgtcagtttgttagcttggagtttctgtcccatgtgggtggcccaggtgtagcgcaggcccccgactccacattcttagatatgactccgtttacccagagttcgagtgctgcactggtttctctagtttcacaaaagggcaactcatcttgggctccagctgtctgcagagggccagttccagaacctcctgctgtgtgtgaagctgcggctttgactcccacccctaagacatacctggtcctggaccctttataggcaactcagcttcaaaccactggctatgggaccttcttcattccaagagcctggctgtcatgtttccccgtcttgtctttgagcagggagatggtgcagttctgtgtgtgtgtcgagtgtgtatatgtgaatatgtgcgttggcttcctacacctgctgtctcagccaacttgacggaggtctcttgcagctgcaagccttgggcaagccacataatcactctgtttctcaatttacccatcaggaaaatggtatcacaatggtacccatatcgcagggtggctgtgaggctttaatgctatttaagatatgcaactggccgggcacggtggctcaggcctgtaatcctagcactctgggaagccgaggcaggaggatcacctgagggtcaggagtttgagaccagcctggccaacatggtgaaaccccatctctactaaaaatacaatattagccgggcgtggtggcaggcgcctgtaatcccagctattcaggaggctgaggcaggcgaatcacttgaacctgggaggtggaggttgcagtgagccaatatcgcgccactgcacttcagcctgggagacaaagtgagattccgtctcgaaaaacaaacaaacaaaaaaaaaacccacaccaccaaaccttgtttagcctctcgttccgttatctagaacagccatgtcagaccagaagggcacaccccagaactcaaaaccatgcttttccctgggtgaggagtaaggggtggttctagttttggttgtgtgtttgtgtgtatacattttctgcaatcagcaggagtcacttttatgattacagggaaaagggcaatcaatacttaaaacagcaggcacctgcttatctctttaagcgctgagagccagctagtgttcaataaaagcttcaggacatgcttggcatgagctgacatttttgtagtggttagggtggcttgaaggaggagggaggagggcagccatggagagcggtgtttcctgtactgcatgtgtttgagggggcagggggagcagttttagattcacagaaaaattgagcagaaggtgcagagatttcctatatactccccactcccccacatgcacagcctccccgattttcaacatcccgcaccagagagcaggtaagagaatgaatccagagtagacagtggtcactcttaggagtactgccttgcctggctctgggaaacccaaactccgagggctccaagcctccacccaactctccacctacccccaccccccaattcagcaacaacgtttttttgtttttttttttttttttggagacagggtctcgctctgttacccaggctgtagcgcagcggcgcgatttctcttcaatgcaacctctgcctcccaagctcaagcaatcctcccatctcagcctccccagtagctgggaccacaggcctatgccaccacactcagctagtttttatttttttctttttttgcagacagaaaaaaaagtgcagtggcacgatctcagctcattgcaacctctgcctcctgggttcaagttctcctgcctcagcctcctgagtagctgtgattacaggcgcatgccaacatgctcggcttatttatttacttatttatttatttatttttgcccaggctgcagtgcagtggcgtgatctcggctcactgcaatctccgcctcccaggttcaagcgattctcctgcctcagcctcccgagtagctgggattacaggcgcccgccactgtgctcagctaattttttgtatttttagtagagacggggtttcactatgttggccaggctagtcttgaactcctgacctcgtgagtcgcctgcctcagcctcccagagtgccgggattacaggcgtgagccaccgtgcccggccaatttttgtatttttagtagagatggagtttcaccatgttggccaggctggtctcgaactcctgacctcaagtgatccgcctgcctcggcctcccagagtgctgggattacaggcgtgaaccactgcacccggctgactcatgcttctttaaggacactcttcggctgggcacagaggctcacacctgtaatcccagcactttgggaggctgaggcaggtgaataggagttcgagaccagcctgggcaacatggcaaaaccctgtctctatactaaaaatacaaaaattagtcgggcctggtggcaggtgcctgtagtcccagctactcggggaggctgaggcaggataattgcttgaactcgggaggcggaggttgcggtaagccaagattatgccactgcactccagcctgggcaacagagcaagattccgtctcaaaacgaacaaaaaaaacccataaaagtcactcttcttcacaatatggggagttggggaccagctagaggtttggggctggccctctgcttggtggtggttgggatggtcccataggggagccactgtggcccagaggcctgagccgtgtgggcccgggccttgtttactggactgtgggcttcctgggtgctgggcctgctcccagggagtggctccttcccaaagcgtccctttgccttgggagcggaaccacgcaatagcctgactggccctggcagcccatgccttgtggccagtcaccagagagggcacacgagacccaggccaggggtatcagggacagcccctggtcagactctgctagtttccctgcctttcgctacgtggctggaccacaggggaagaaatggcaagaaaccgtgtctaactctcccttgatacaaattcaaagctggcttgggggatggccacctttgggacacacacctggacagatctaagccagcagcgtggctgtttgctaggcactgttctgtgcctggggcttaatttacagaggtacggctgaatgaccatgaggagaggccaaagccatcgcaagattgatcgcatttcctgagagaaggggcacccatgccatgcacggttctcagtagagaaccccaggtttggtcaggaggcagaagcaggggcgaggggagagcccaggcctgaggctttcttggggtttccatggaaaaggcctggcagggcagggaaagagtttaaaattggctagtttgagtaattctagcaggctctgggctgcagagtggtctctagtcacctgatacctggccctgggtgacttagggcagggagaatcttgcctccaaaggcgagaattagataaggaggtagctggggctgtagacttggggtctttttttttttttgagacagagtctcactctttcccccaggccggagtgcagtagcgtgatcttggctcactgcaagctccacctcccgggttcacaccattctcctgcctcagcctcccgagtagctgggaccacaggcgcccgccaccatgcccggctaattttttgtatttttagtagagacggggtttcaccatgttagccaggatggtctcgatctcctgacctcgtgatccacccgcctcggcctcccaaagtgctgggattacaggtgtgagccaccgcgtccgcccggggttgtctgttttgtatatgaaaagcatgctctgccccgagccttagctatctctctctcttttttatttttgagacggagtcttgctctgtggcccaggctggagtgcagtggcaccatctcggctcactgcaacctccacctcccgggttcaagcgattctcctgcctcagcctcccaagtagctgggattacaggcgcccgccaccacgcccagctgatttgttgcatttttagtagaggcggggtttcaccgtgttcgccaggatggtctcgatttcctgacctcgtgatctacccgcctcagcctccaaaagtgttgggattacaggcgtgagccaccgcgcccggctggaaatccataatttcaatggatcagaatttgcctgtcacgttctctgtgccaggcacggagcgggggggcggcagggatggaacccggcacatgggcctctgcctccttggcgcgctgtaggcgcgagcctaaagtcatcaggcracagcccccgccacgttccggggcgccccgacggctccagcagcgggtggggtgggaggcgtccggacagtccggaggcctcgatggccaagaggagcctgggctggagggggccaggcccgggggcggccgggggagggcccgggactggcgcagaggcagcgcgaggcagaggcaagcactcggacgaaggcgcagccccagcctcggggtgcggaacgggcaccttccgggccacttgagtctgagaccttgtagccggctcgaggcccgggcgcagcagtccctgccagccagctttcggcgcaatgggacgcgggcgctcctggtgtgccggcctcgggccctgcaccctcacgcatgcgcgccccccccggtggactacaactcccggcgtgccccgcgcgcctcccggaagtgatcgctccagtcgcctccgacctcggcgctgggcgggcgcgccgggcctggggaaggggcgggcgcggggacccgatgcgcgggagcggaggccgagatggcttcggcgggaggcgaagactgcgagagccccgcgccggaggccgaccgtccgcaccagcggcccttcctgataggggtgagcggcggcactgccagcgggaaggtaaggggccgagcgggccggggtctcgcctctcgccggtgcctacgggcggcccggtccagagaggagaccccagccccggccgaggggccccctgccaggcaggggcagggcgcgggagcgaaggggctgcaggccgcgatgggccggggcgggctggggcgggcgaggggttggggcgctgggcctcggggctcccccacagcctctccgccggccgggctcctcggagccccaagtccgtgctaaccccgttgggcccccgcggcccttccgctgagaccatccacacctgttggtgtcctcccgccttccgagcatancccccagggggcgggtgggtcagtgtctccagaagccggccccgtgcctgtcacaggacsagcggttccaggcgggaatcccgcttctgtgtctccagtcgaccgtgtgtgagaagatcatggagttgctgggacagaacgaggtggaacagcggcagcggaaggtggtcatcctgagccaggacaggttctacaaggtcctgacggcagagcagaaggccaaggccttgaaaggacagtacaattttgaccatccaggtaaatcgcgagcccaacgatgtggggagggcagaccccattctgggcggccgctaaccagctgcgcttgggcccaaggttggatggatgcagacccgcttgggctgttcccccaactcgccacgcagcctgcagtggagttggctgcacagtgaagtcaggggaactttgctgagttctctgggccctgagtgtccccccaggagcgtggttggagccagtcaggaagcctgttgcactgtggggagccctgccctgccctgccacaactgtgrtcctggagaaatcctcccatcttcccttcccacgttggggcctttagggccctccacacacacctctgcccactgtgccctcccgtgctttggggcaaagtcctcagagaggccagtgtgggaggcggtaggtaaactagtgctggtggcttgaagctccgggccaggtaaacgggcagatgyggcagggagacacctgccactgctagaagattccaccctggctggctggcatggtcagccttttcccaaggacttgtgggaagaaggcctgcaaagccgcagtctaaccagttagtcccagaaagagagagaagcagaggcccagcctacccacctcccaggaagagctgatcagaaaacccctgtgttccggcatctcaggggcacagagcttgggcagtggcacagcccgagaacagcaaggacagggtcatcctgtggtctgcagggctgcagagggcactgttgctaccaaacatacactgccgtagtcctagtctacctgtgctagggttctcggtgtccccagcacccagctgtgctgaccccagagcagagagggttccctgctgtccgctgcacgagggcatctgcctgtcttgcctttgtctccaaccctgcagatgcctttgataatgatttgatgcacaggactctgaagaacatcgtggagggcaaaacggtggaggtgccgacctatgattttgtgacacactcaaggtaagcaggtggttctagggagggccgaggagaggggccagctaggacgtcccctcgggctcacacagacctgcctggcggcaggcctccsccggttggtttctgtgggtcccccaccccttcccacagtcagtgtccctgcaatggaagctgactgtgtgtgtggcctggagaccctgtgtctgcagcagagcccctttccccgtgcgcccctcaggttaccagagaccacggtggtctaccctgcggacgtggttctgtttgagggcatcttggtgttctacagccaggagatccgggacatgttccacctgcgcctcttcgtggacaccgactccgacgtcaggctgtctcgaagaggtaaggcggcygcgggcctccgtgcstgcctggccgaggctggcggcaggtcctgaggtctgaagcacgcctgccccttgccgctgcagttctccgggacgtgcgccgagggagggacctggagcagattctgacgcagtacaccaccttcgtgaagccggccttcgaggagttctgyctgccggtacctgtgctcgctgcttcagagcccattttcccctttcacaaggacacatgggacccagtactgtgagagggcttagtgctgggtgacagtgatctgattgaaaaaaaggagaagaatttggctcattayggccacataccctgggagtagttctcagctgtaaaaacattctctgtgcctgctcctccctctgcctaaaaaagccccatatctcccccacattcacactggccgcttcctccctgcctcaggcccttgcccagcgtccccattcaacactgaaaaccctctgcacccagcgccagcctctctgcctgcttcctttttccggggcacttaccatcatctgacacgtcctgggtgcttattccccgcagagtggggaagcccaggagcactttagtctgttcactgccaaggccgggatctggccctcagaaggtgcttcagagctgctcctccagggtctgtgaccccaggctgctctgggccagtgctctgaaatcttggagtgagcgctgtgcccagatcccagctggctcgcagagagcaggaactccccgctgcacacccacctgtcttttctccatttctccatcttgtgtttctggcttggtgggactcgtggctctactcaaatgggagtgttttgcacgggaacattttgcctgttaaggtaaaaatacagcacaaaggaactgaaaccaagattcctgcctttgataatgtaggacaagtaagttctatctgctgctttttttttttttgagatagggtctctttttgtcgtctagggtggagtgcaatggcacgatctcggctcactccaaactccacctcccaagtttaagcaattctcctgtctcacccttccragtagctgggattacaggcgtacgccaccacacccagctaatttttgtatttttagtggagatggggttttgccatgttggctgggctggtctcgaactcctggactcaagtgacccacccactttggcctcccaaaatgctgggattgagccactgtgcctggcctttttttaaattttatttttaatgaggcagagtcttgctctgttgcccaggctggagtacagtggtgcaatcacagctcactgcagtcttgacctcctaagctcaagcgatccttccacctcagcaacccgagtagctgggcccacaggcgtgcaccaccatgctcggttaatttttaaattttttgtagagatggggtctccctgtgttgcccaggctggtctccatctcctgggatctagtggtcctcccacctcagcttcccaragtgctgagattacaggtgtgagccactatgcctggcctattggctgctatataaagaaaacttttgtttttttttgcattcatgctgtctgaaatttctaaaatataattttaaaagtaaagttaacttgttttagtctctcattcacagaaagatatttggcaaaaagtaggtgattcgcagtaaaactctggatatcaaatctgcctcagcgacctgagtagaggaagtgctgtcacctgctatgtcctgggcccaggccccagagatgtttttggttggtttgtttgcttgcttgttttttgagacagggtctccctctgccacccaggcccaagtgcagtggtgagatcttgcttcactgcagcctccaccttccactctcaagtgatcctcccacctcaggctcctgagtagccagagactacaggcacgcaccaccacgcctggctaatttttcctttttttttttttttgcacagacggggttttgccatgttggctgggctggtctcaaactcctggcctcaagcagtccacccacctcagcctcccaaagtgctgggatcaccggcgtgagccaccgcacccggccccagccccacccagagccgttcttgagcctccttttccttcaccttcatgttgagtggcttgtgcagtcctctgcctggaccccgtaggtatttcccaactgtattcaggcccatccctgctggcggttaagacccctgtcagctctcccggactcctccagcccgtcagactatcagactagaatagaaagcagccctcgcccttgcgctcrtgctttcatgagatggggtcccaccaactgcagacacagctgtccccaggacttggtccctgtctgcctcttgcagcttgtctcttctgccgccttcttgacccaaatccacacgccagcagcacgcaccgttccaagttccgtccttcggcccagaccctgccctccctcttccctcagctttgtctgattcagccatgttctccaggctgcttccccttccctaaagccaccccccaacccccaccatctggctgcggaccctccccagcagccctgcatttcctgatatatctccatccttgtccttcctcagcagcagagcatctgacagggaatgagagtcagcattgagccaatgagtggttggatgagggagtaagttaccatcagcgtctctgcctgcagtaattatgcacggcggcggctgtcctgttgctgtgccagggtatttgcagaagcttcatgattccagaggaacaatgtcacactttgtagaagtgccacacttagcttggcccagtgaattgagtcrttagcgtagccagctgtctcctgtaatggagtgggaacactggaagggggctgtcttctgtgatggaatggggacactggaagaggcactttcttttggyygcctcagctgcactttctgcctcacttcttggatcatggcctctcacacctggctgatgactgagtctgtgtcccccatttgccgatgacaccagcacctctgagcaccccagggccgcccctcctgctgttgcatctgtttctgagcatcttaaaatcacctttgaaggaaaagtcctcacaggaacacccccccttgtgccttacagacaaagaagtatgccgatgtgatcatcccrcgaggagtggacaatatgggtaagaagctggcctgctgggctgtccccccgcccctcccagagcttgaggcagggacagttccaccagtgtgcagttactgagcactcccctgcgcacgcggcctgccagtgttgatctgcggcacagggttaaaatatgcttaaaaatgtatgtagctgggcgcggtggctcacactggtaatcccagcactttgggaggctgaggcagggggatcactggagcccaggagttcaacagcctggggaacatagcaaaaccccatctctacaaaaaataaaattatttgggcatggtggcatgtgcctctggtcccagctactcaggaggctgaggtgggaggattgcttgagcctgggaggttgaggctgcagtgagctgtgattgggccactgcactccagcctaggcagtaaagtaagaacctgtttcttaaaacatatatatatgtatattcaaatctgttagcagaaagtactttaagcagactctaacataaattcctggaagaccaagctaagaagtcttattttgctgtgtcctgatgcatgtttctgtctgctgagatttgactcgatgcccctcgccgcaggctgtgcctcagggcagaggttgggcgctcactcctggccgagtgctgcggggaggggcggtctccacggaggatggatgcggctaacccgctgcttgtctgtctcttggcgcagttgccatcaacctgatcgtgcagcacatccaggacattctgaatggtgacatctgcaaatggcaccgaggagggtccaatgggcggagctacaagcggaccttttctgagccaggggaccaccctgggatgcygacctctggcaaacggtcacatttggagtccagcagcagaccccactgaggggctgccgagcctcagggcaggtctcccgcccggcatgtgtgttcagggactgagcctggggacgcccacccacacccactgcttcctctcggcgcaccccaggggagtgttagcagcgaggccttcctcactcaggagtggaaactcagatgtgtcactcagactcaacttgctgggacactgacaggcgttcctgaggttttcagccacttaggctcgttgcggtttaaagatccctctaggtcactgagaaatgccacagaatgtgcaggaagcctgggaggcttctgtgaggaatgtgaggcacattattggggaaattgaggagacagcctagacactggctggcctgatgttttgttgacagtgaacccacagtgggagagagttttttccagtctgatctggttcttacacactcacacacataactcaaaagttttgtgaacaagtactttccttttttacatgttacatgtcctcatgttttctgttttctgtttcataacacaaggctggttgtggcctacaaacctaatttcatgacccagtggtttgcagtccagcgtggcctacacggatatggggagccactgagggatgttttccccccttgcttgtgccttaaaggcagagaagcgaggcggatgccctggaagcacccagcatcacacccaggcttgtgcggggccaggctgggagcccatgcagtagggcagaaggcagcggaggccaggtctgtcccggctggagaacagcgtccacgcagtcctgcctggggtcaggccctcactgaccctcaggggagcccccaaggtgctgtctgtctagacaggctgtcccaccccagggtggctagtggccatatgcagggaatggtgcttctggctgtggcacgcactggatcacccaggtcccagcagacatggccgcccaaagtcagcaagcctcytttgtgctatgtggagctcacagcctcacatgtgaacacccgtgtctgggttgcctggggtgatcctccctcctgmgtggtggctgtctctggaaagcatcccttgccgctgccaygggcagccccagcccccgtccgtccaggctcacccacagtagtgatgcagacgtgacgtgggggaagggggctgagccctgtggctgggttctgacaactgtaacggttttgtcgagcttaggcccctttggagggagaatcaataaataacaaacmccaactacaaacgccagttggttccttttttaattacatttaaaaaagacaaaggcatggagctgtatggatgacacaccttgaccactgacgaggaagatttcactcagccacgtctcagtggagtctcagaggggagggtttccacacagcacggtgccaagggccagtcttgacgctgtcatagacaatgacatgcaagccccagccctggctcgtggttcaggtggccctccaacactgagctgtcccgggacgcctgccgggctcgctgagggcagggccgggacttgctcaggttgctgggtgttcatgaaggaggatcgggtctgccagatcaaactccaccctgcagcaattagcaaggaccaggccctggtctgctgaggctccactgctggccctgggttctcggcttttcgttgtcgatgactcctacgctggcctctgaaatactccctgtgtcttagttcaggggtgaagacacggaatatctttattgtcgagaaaaaattaactttgcacaaaaggaggtgctcatcagagagcttttcaatgagacccccatgtgttccactagaggccctgctcagcccagcccgtgtcctcccagcgtggggcccaccctgctcattacgtacattgaccaagacccttcaacctcgtcccgaccccagcacgggtgttctttgccacactcttgttctagtgttttcggatcaagatgtcccagctgtctttccagcgaagggccttgagttcatgtggcgagagtgacttgtccccgtaggtgagtgggcgcagcgtgttggacacgtggcacgcggaggagtaccaggccaccaccagggcgctgaagatgctcctctggagctgggacctgcagaggtcagagcagcgtgggggagggtggctgaccactgcggcttccctgcccggcaccctcttgacatctgctgtccacacggtcaccccccgaggcctggggttctgccttcaggtttctgtgtcttgtctcctgccacccatgaccatctcccacctggatgcactgagaggggccccctgatgactcctcaggcctccacagtggctgggccacctccacacagatgccagaggactggtcccaaacccacggtcctcccttgtgtggcttcctgaaaccgggaggccctcgccctctgctccaacctccaaacacactctggtttagaagctttcttgggttctctccaccacaccacacaacccgaccataaccagctgccgtttctgacaccccaggctcctgggccttgctccctgctcccgaatcctccaggccacccacatctcttcatcccctccccgtctccccacccactccgctttcatctctgtcagccgcgacttctccctctgggttcctgcagtgcctcatctgggcatctcttctgaacctcacccattccccggagggacccggaggatgtcagtgtaacgtgaaatgggtgaggttcgctgcaccccatgtgtttgctgcgcatgggcttcccagcagagggctgctgcccggtccagccactgtctccacagcccccgtacctgcacaggtggtcgctgatgtgctgcaggaccacagggagcagaaggatttggaaggtgagtgcgggcaggtagtggtagaggaagagtgtcttctccatcaggaagaacgggaggtagttcactgcccagccaccggcacacagcrccccagccagcacccagcgcagccaggcatctataggaaagggctcgagctacaccgactctgctgctcccacaggccgggtcttctctctcttttgcttttttagagagagggttcttactatgttgcccaggctggttttgaactcctggcctcaggtgactccctcactttggcctcccaaagtgctgggattacaggtgtaagccaccgcgcccggcctggctgcctgtgttacccagccatttccagcgcatacgggcaacatgggaccaagggggcaattcctgcccaatacgctgcactcgactggagacacctctaacgcaacatgggaacttaacattttgtctcttgggagacaaacataatttaagattccacaatacagaaacaaagaggccgccttaaggggtaggttcctatgaagtcggtttgtcacttgaggcggtgaatgctcagcgcacacctgtaatcctagcactatgggaggccgaggcaggaggatcgcttaagcccaggagttcaagaacaccctggacaacacagcaagaccccatgtctatattaaaaagaaagaaagccatgtgggagaggtactaaccctgagggaggtcatggacatttcttcgccgtcggagcaggtaccacaaggacagcagggcgtagatggccagagcgaggctgcccgaaacccagatcactatgtttccaagtaggtggatctgagcctaagggaacatgggagatgctgttagccacctgccctctgctcagggagggaagagaagagaacacaggaaaggaattcagatgcacgcactactttagcagagtgaaaaaacgccaggcacagcctagcatccactaggccttactactactgtggacaggtctgctcctactcagacctttcattaaaagcactgatgccagccgggtgtggtggcacatgcctgtaatcccagcactttgggaagctgaggtgggcagatcacctgaagtcaggagtttgagaccagcctgcccaacgtggcgaaaccccgtctctattaaaaagtacaaaaatcagctgggcattgcggtgggcacctgtaataccagctacttggaggctgaggcaggagaactgcttgaacctgggaggtggaggttgcagtgagccaagatcacgccactgtactccagcctggatgacagagcaagactccgtctctctctttctctctcacatacacacacacacacagcactgatgctctcaattttgtaattggaaactgaaaattgggagcagatgactccactttgtaacagcagcactgtccacggaggagaatgcaaagtgcgctcagagctcggggtggggcggcctctgggcctgagcctctgccttcagtgcacatgctgagccgacctacccgcctctgagggaggaggaaaaaggtgggcatttccagcgtctgcccattcagtgaatatttatggggcgctgactgtgtgcccggcctaccaatgctttcactctgccgggtggagagacggcacgcacatcagcaaagcaccggtaagctccaccaccaggtgccacacggaaaattgaatgggaatatcttaaaaccactttcgccaggaaaaggggaacaatgtgtctccacaaaagcaatcaagccgggtttccttcaacaggcacacatgccacacccctactcctggctccaggttgccaaagcgtttagagaaaaccaagtcacaggcctttgtcaggaaaagctttggagaaacccagcactttctagggtgcagcggctgctcttaatgcaaggaattctcaacaaacaggatgaatctatgactgtcagctgtcagcatcgctcgcttacgctggtyctggggtgcagccagtaggcaatattggtgtccagggtgacccactccagtgggctggagctgtacttgtgttccgagtcatcacttctcagcgccagcatcctccactggaacaaagcagaggcctctgagattgaggatgggggatgcctcccgctgtgcgtggatttggtcaaaggagtacactgctgccccttgcacgtggactggcccagctcaagttcattcggatcatgcatcggaggcagcatgatgagaacctggattccagccctgaatgtggccttgggagggtcgccccaccctatgtgctccagttacctcctctgtagacgaagtgattgggctgaatgctctctaaggtcacgttcagatttgtgaccgtgagtttctgattgtgacttctcttgggctctgttgagtgtggcccatttcgctgcctgggggccttaagacaccctggcgatgttgcagaacctcctgggtccctattattcctgaccacagggccacaaggtgtgggccaggggtgtcacacacagtcccttacactggagagaggagacactcattctgttgtgagcctgtagctccagcgtcaaagcctgactctggtttgagtcctgtgcagcccccaggcctccctgctgaggagtcaatgctcagcgagctaggccagcttcccctggccgctcctcacctgcagctccgagaatctcgccatgaagctgaggttcctgctgacgtccacctgcgcaggtgagtgcagctcccgttcccgctccctctgctcctggcctggcagaacagacaagggcataacagatagaagtagcacaaggtcaagagctcagagcagaagctgtcagtgcagcaaaaagctggcttcctgcctttctaacaaagaccccttatcgaaccgcatcactccacttagctttccccaccacacccaagactgcccggtcaaatgaggtgatttcgaccctgagaaagctccacttgcacggggataaactggttgccttccagcgacacctcggaagaagcgtcttgagttattactgcagcagctgagtgcagggtgcagggagggagatgacctgccaccgagcatggagaatgtgctcagttcccttcccaccaaaatgagaactctggggtgttatcaaatattgagcagctgaaagtacattccaggagcggcggaagccacgccgcggactcactcgcgccrtatcggtgctcctccacgttccacaccgtgctcccgtggtagccccgggacagcttctccccgacgatctccagttgccgatacccccagtcagggaggtgagccccgctcagctggtgacaccgcaggagagtaaagggcgtgatgggaaggccgtggctcccgtgtccactcgggttggaaggggaacccctgcccgggtcacgctgtcagcaggtgccccttgtgggagattcacattgggattccatcctgagaagttacaaaagccgccctccctcagtgtaagaggaagccatgatgactcaaatgaagcgttccgcctgcagagaggcggtgaagcctgaggggcttgggaaacagactggagcccacagctcaggacaggccaagccacggacagtgtccttacctttaagacagcggaagtgttcacgtgcacaaagcggacctctgagaggatggtcttccagacgtctgtgtcagatcctctgttcacaatytcctgcaaaaagacatctcaaggattatttcattccttttcaaatttccttcaatgtaaaaataaagacctgtcaccaaacaatgatactgacttgagcctgagacaaagggacaagtccccaagtgagggaagctataaggggctggtactggccttccttcccaatgcccacagcaccccgggctgctccgagggtcgctggggaagtgcaccctcctcctcgccaaggccgtacaagaggcctcctcacagaaaatacaaagcctgatgttcttcgtgcctctctgcaaagcctattcatagggctcagagccctggccaaaaagtgagcaagtctcagtccctatctggcaggactcgcagacagctcagatgaaggccagacactgtccctgccagacacagcttagagatttcctcgcatcgagtaataaaaaagacaactaacatctgaaaggcactttgccttgtcacagcctgacatactggagcctcacaatgaccccatgacatcacatgactgtcattttcccatactgtcacaaccagagaacccaagaagctaggcaggagcaggcatgaggaggcctggccgcggtccatgccgcaggccgggcgcgcacacctcacgcatgctccctccttcct

SEQ ID NO: 95453 - DNA, 315525 bp, Homo sapiens
  misc_feature (1)...(315525): n = A,T,C or G
tgttaaagagaaaaggagtaactgaattcaaaagaaaatagattatacaggctggtggaaattagactggtattcttaatggtgtatatatatttttaatgttagaaacaatataacatcaatttttttaaaccttagaattctcccaccctggtatactatgcagccataaaaaaggatgagttcatgtcctttgtaggacatgaaaccatcctttgtaggaatgaaaccatcattctcagcaaactatctcaaggacagaaaaccaaacaccacatgttctcactcacaggtaggaactgaacaatgagaacacttggacacaggaaggggaacatcacacatgggggcctgtcgtggggtsgggggaggggggaaggatagcattaggagatatacctaatgtaaatgacgagttaatgggtgcagcacaccaacatggcacatatatacatatgtaacaaacctgcatgttgtgcacatataccctagaacttaaagtataaacaaaaaacaaaaacttcacatgtgctctctagatcaagcttatctgttaccttcatacagctattgagtcggttactgaggatgaaaaataaataatattgacaaaaatattacaaaaaaaaagaattctcccaccctaacatgagaactttaaacattgttcttttccaggtatttatcgttcatgtgcattattttttacataattataatctccatatatataattttatgtttttgctatgaaattttaggcgcacattgcttagctcttcttcctgcttcctagatgggtcaccaggtattttggagaacttttccagggtcagacctgtatgcctgctaacactgggcctccagttttcttattgttcttagctgaatgtaaacatcaatgagttttgagaagagctagataataccaacctctgggcaaagaacagtaagttaaataggacatgtgtctggtagatttgcatatattctagcttttaaaaactcaagaaaaaagtactgagaggtattgtaaatcactcatgaaggcttaagatacaagtgcacctcttctaaagggttctgagtctttaatatgcaaactcctccaagccttggcactaaatgtattgcagaaggaacattcctttggcatgttaggcatgtaagggacttttcagagcatcttgtctaactctctcatggtgcagacaaggaatctgccaccaagaaagaatgcagatttcactgttgtggggacagagctggagtgacaaaccaggtcttacggctcctaattcaatgctctttccaatcctgagaggaaagaggaacaaggggatggataggattaagaaagaaagaaaaaaaaaaggcagcaaaaaagaaagcaaagctggatgaaagagaagagggtacagggaattaagaagaaaaggaaggcgatgcatatgaggttgtcaagcctttgcttgaatgtaaggttcccagggtaaactggtcctctgaaattagtgtctcaagttatacaggggcatcagctaagcgtttagcctttcttgtctgcttagacatgaagtttctagaaagagagggcaatgtggcaggaggatggtccctagagatttgggaaggatgctggctctacttctctactcttcaatgtcaacgaatgcaatgcatgcctttcatctggattcctgtttttttctcattggaaaaaaaataaaggacagatgaacaggtggaactatccatagctcaccaatgttcctcaagttccctctgaatatttattggacttcagttgctcttgagacatcaccaaaaaaaaaaaaaaatgctaaatgtgcattagcaacttagagaaatgcaacctccggcatttcatagaaaggtccagaaagaatgtgtaactggttcaaagtggcgtagctaagaagaatatatcgatgatctgatgtggtgtcacaaagcacccaaacacgtagtggatgaagtagtcttcaaaaaatggctgctatcagctcttttattcctgaacataacacagtacccctcaagtcagaaggcagagtctatttcccctcctcttgaatctgactggccttgtgacttgctttgaccaatagactgaagcagaaataacattctagaacttccaaactcaacccttaagagaattggcagtttctattcctccctcttggaagcaagatgccatagaagaagtctaaccaccttgctgggaggaagcccaagccagctggatggacagagagaggtcatgtggaggagaactgaggtgcctgatatgtgaatgaggccttcttgaaccttccaattcagtccagctgccagtggccagttgaatgccgtcaaatgagtgacctaggccaggcacagtggctcatacctgtaataccagcactttaggggttgaggttggaaggttgcttgagctaggagtttgagaccatcctgggcaacacagtgagaccttatctccacacaaaaaaataaaaacaattagctaggcgttggggtgcatgcctgtggtcccagctacttgggaggcggaggtgggaggattgcttgagtccaggagatcaaggctgcagtaaactgtaatcatgccattgcactccagcctgttccagcctgtgtgacacagcaagaccctgtctcaaaagcaagcaaacaaacaacaacaacaacaaaaacaaacaaaaaaaccatgagtgaccttaggcaatactcagctaggcttagttgacccactgaatcatgaaaaatagtaaatgactgatgattttggcaactaagttttgggattgtttgttaagcagcaatcaatatctgaaacagtggctttaaacagcaaccatttattgtttctcatgaatctatgagttgggagggtggttctggtgatctggaccaagcctagccaatctcattcagacttgcttgtgcctccacagtcaagtgagggctgactggtcaaggatgcctcagctgttatgactcagctctgctctacagggtctttcatcttccagcaggcttattctggtgatgtcagaattccaagactggaaacagaaatgtgtaaacatttttccagcgttcatttacatcaagccggctactgtcttgttggtcaaagtaaatcatacggttgggcccagaataggagtggactacaaggttagagggaaagaccttggagaaaaaaggaggtcatttattggggggccactaatactatcaaatgtactactaggaacccatgcatgtttctcatagttagaggagtattcaatagcattattaaagttttggactgaggtcaggaatcaattgaaaaaattacatttaaaattaagcaaaataattagatgaatattttctgatttttaaataggtttccagaatttctggccaagtcactattgctcatgatattgatgttgttgtattatttccaatacaggatgactttcctaaatccctgttgatagagttggagatagaatcaggaagaaataccaggtctcatactacatggtcattcattccattaatcaattcacagtaataatgcaatcgtaaggctcttggtagagttccttagaatcctgcttcataaagttagctctctaaatagccagtgggcagtctggttggacacttctctctgaaaacctaaggctgtttgcttttgggctttacagaagtggctcaataccaggctcattaatgggaaaagggtcatgtgtatggatacatgtatttggacatttatacgtaatgcgtgatcacttttgatccaatgtttggctttacctgtcttcatctcccctgcattaccagaaactgactttgcactttcacttaccaccgcctccctgggaggcaaattcattttccactctggatttcatagctgaagtctgagaagcaggaaaaggagagactgggattaccattcccagattccaaactagcctgctagttacagcggtatgatgctgccccctatacagtgattcgtaccagtmagatgaacggttctttgatcggttcttctgtcctccaccactggtctatccaccccatcttgaactttgttaatacaatatttctgctagttattgttcagggattgagagtcagggaaactgtgttctggtccttgggttacttaatgtcttgagaccttagtttcctcatctgtaaagtgggagggctggactagatgtatgttcctcctgctctgagctgtgaagcgtctaggatgccaggagaaaaccaracccaagtcacagggttctaaacaaaccataccttaaatctctcagtaatggccagccacatctgcaagaagcaggctgggaaaacagctgaagaataacagatatttgttttatttgtcaattatggctcagtaaagctaaaaaaaaatagatacttctgttatcaagaaattattgcacttgattcaaggctgatattaaaccatagcagactcactcaaggtggggggtgagagaaacaaagagattacaaaactgaaaagaggtgttcatttgcagagaactaagggagtatccttcaaacagaaactggaagccagagatctctgaagataaggatcatgaaatgttgttattccccagacagaatgtatcccacgttttccaccggcgttgtttttggtaaagaagggtaagtggaaggaagtgatgaggctgaaaaataccatttgcttcaattcagccgcgaaggatccgctaccttttggttcctattaagtgaatttagctttagctttcatgatagcattttcccaaaggagtcctttagatctgacccctaccctcttcgcagctagactgacatcaggtgacgttgcaagtgcccccagcccactaagcgctatcagtaggaattggccctcagccccgtcacagcgctttcccatgacatcccccagcttctctctcctaggacctcctcgccagcctacccctacctgttgggtaggtcttacttgctgggaacacctgctgtccttagaatgggagcaaccaacgccttggaatcctggcctgtcccttcctcgtgaagggggcgcctgcgctcaagtgccggcttcgccgcctcaggcagagtctagcaggcgggcgaccaggcgtagctgagttctgtggcctggggaaaggggacgccctatccccacagccctgtttcgcagggcttcaagacgctgagaacggccgggaacccctggagtcttggaggcacccgccaattccaggggcccaccccaaccccgctctcagtctgggccagcggcggcgggacaggcgcccggtccccacacaccggctgagacgcccagcccactgcggctgaagctccggccgctgttgcggcaggtgctgcaaaccggtctgccttcgctgcagggcttgcggggatggggcaagtgggtggagagaaaaggggaagagcctgggcggccggcaggcggggcctgcagcctccccagccgcggcagccgccgcgcagccggctctctctgcgcctcgctccgactccggcgcgcaccaagcgggaacccgcgcccgagcccggcgggcgccgctgctgctcctctcggtccccggttcccggtccccgaacgcgccgcggcgaggctgcgcccggcagtggagccgctcggagctgctgggctttggcggccgctcgctgctccgtctggccggaggaccggcggggaaggaaggggaaagcggggacacacacactcgccgcggcgcgcgcgcactgcacactcgtagccgcgcgcccccgccaaggcgcgtccggagcgagtttggccccgcggctccagccccggcacctgcccgccctcagcgttgcccccggccccggccccgcccgccgccccctccgccctcccgcccctcccgcccctcccgcccctcgcctgcactgctctcccttcgctgtggggaagcgacaacgtcccgataacttgcagactgtggcgcaactggtcttggtagcggaggcacccgaatgctgcccgggtgaggtaagtttcctgtgcgtccccggccccttcccactagacccttctgaggggctygcgcttaggggctctgcatctctgctgaaacccgtcggtctctctacccttccactttgcctgtctgcgttgtgctgggggtgacgtggagagggcgcccgtggccaccgaagcggaccttcgttccgcgggggccacagctgcgcgctcccaacggacacccacccgctcgtcacccggatccccggggccgcagtgacactcggagatcactctgggttcacttaaataggagtactctccccttttccggggaacctgcagagtttggcagcggaaggaaaggtctcccaccaccctcccccggtacgaaacagcggtgaacttgttaggcgccctggtatctcaagaggggcttgcgagttggtgttctgctcatttctggcgctggtgccggattgaacaggtgcggtatggttccagtctaaatgcagcaacagacttctgcgtttcccaggctttctcccccagcctggtcaacgtgacgcttcaacatctggggcaggggctgggagtgtaggggcactggggagggagaatgcccgggtttgatttactatgccggtgccaggagtcgccagaacagaagaaaacaaatgtctgcttatctggcatctatgcagatgagcgtgttgtcatttcttatcccccccaacccccagctctcttgtctggtgcccagcgtggctgagtagaaacctattccggagaagttatttgggtagattgattaattctttcatcgaatctactgaaatcagggctccgaacaaggcaatcctagttactctgatgcttttttaaagggagcgtgttacagatcagaaataacacccactatcatcactacctctctgtgacattctcagatgcaggaggccctagctttaaggggaatgatccttaagggaccggtaggacctcagaatgtgttaatctcgtgcaaggaagaagcggtctctgtgtcagtacttctgagtctcggtttggggaaccccttttgtccctctaatgaagcacattcagccagagacttctcccctgttctgcgaagagactgaagcgttctgcagctgttggagtggagaaaggcgaaaggattggtttcattaggactctaatgtgatgaagtaaggatgggtttcattaggactctaatgtgatgaagtagggtagtgttcatggaagctttgctagagcattcccagctgaaaggagacgctgggaaaaaaccttaatcggccaagtgtaaaccagtgggaggttgagtgagtttcatgtgtgatctctgagcggagggaaacggtggttctgatatggtcctgtgggcagagacttatgaggactgatgagaaagctggtgagtttgagactgatgtatgatgacatcttacctgagaaggaaaactgtgaagcactaaatgatagaaccacattacatttttgtccacgttaagactagagagatttaataataacaccttacatttgcatcagtgtcttgcaatttgtaaattcttttgagtgttctcacctaattccaaacatttctgagggaggcagggcaaagactttttaccatgtaaacacagaaggaacatgaggctcacagattcagagatttatcaaggtaacaagtgctggtattagaatcacasttaggttttctgtcataaccaggtgcctgctctgtacttatataaggtggttttttaaatggcagagttcttctgcatttattgtggtctgcatagtctcactgtaaattactgtttacattttacagatgaggaaactgaggtttagacaagcagtgggagttttccatggatttacatctcatttagtggcatttgcaagactagaacttggatcttctgatgtccagtccattgctttgtgtattctgccatcatttcagttctgatagcaatgaggacacatcatggaaactgcaatacacaaaggactgttaagcatgcccccagtgacctgggttctagttctgggactacatttggccgtatgacctgggccatcatatcacttccaagtctcaagtgtctcacatataaaacaaaacgtttgtatgaaattatgttttytctttccaactttagcattttgtgatgtttaccaatgtgtttgtaatccaatgttatcattttctctagaggaaggagacctttgtaccccacatcacctaagagacctagctaattactctttcacctttagtttatcccttcccmcctttactacatgccacttcatcraaggaatgaaacttaacaagtgcgttttagcttaacatctacagtatattgtttagtttactgtttgacttgaaaatattctgaggggttaaagtactgtaaggtacatgtcagggcttacttgaatattctaattgtaagctcataactttttttttttagctttatggtttgcataaagtaagtgctcagtaaatagctgttgaattaatgaagggggtgaatgaagtcattcataaggaaaacatatgctgtaaaacatagaaagcatcttaccatgtaaattcccaacacataagataatttgcctacaggcatgtgcctcctgaagctggcgggtacagagcccattgttgctctcttttctgaaggcatcatatagggaagagcttttctttctccctagacagtagactcatgtcatctatgttatgctcttttgtttgccgccccccccgcccctttagttgttagtattacagctgctgaaagatacattcctagaaattgacttgtcccattttatgaaagggtatgtcttgacatggggaaaccaaccattctgtttttaaaacagggtattgaataaatttcaggagatgctaatactgtctcgtggtttcagagggggaacctagttaacaaaaccaacctagtttctgttccttttaacaatcttctctttctactcctcctctttatatacagacaagtagtgtttttatgtttggaagaatgataakaaagaatatagtgatcttaaatattattaatggatctgcaatttacattggggattgatgtatgtttccttctgataaagaatttaaatattaattagtttagaagtaccgtttatgggtaagaaaactaaaacttaggtgaattgacttacttatggtcacaaagatgatagcaggaggaccaagatcaatgtggaattcttaagaaggttcatatttgagtttgtcccaggagttctatggtgaaggtacagttttgacttttagaaatcatagagattaacagaaaacttctgtttactatcattattagagagttagtacatttgaaaatggtttagcatttatatgtttaagttttcttgcccaagcagatgccattaaaaataacatgtttttttctctttactttttttttgttttttgagtcaaggtctcattctgtttcccaggctggagtgcagtggcccaactccagcctcaacctccccaggctcaggtaatcctcccacctcaacttcctgagtagctgcaacaacaggcacgcactaccatgcctggctaatttttgtatttttggcagagacagggttgcaccatgttgcctaggctggtctgtaactcgtggattcaagcaatccacaggcatcggcttcccacagtgctgggattacaggtgtgagaccctgtgctcggccaaaatgtttgtttttatctattcactrtgattcttctggcttatgtgcatcaccagactcagaaataatactttgctccaatcagtgctgggagagaggaaactgttcaaatagaaaccaaagacctgtaatcccatgggaggccgaggtgggcgaatcacttgagcccaggagtttgagaccagcctgggcaacatagcaagaccccatctatrcaaaaataaaaaattagctgggtatggtggcacgtgcctgtggtcscagctacttgggaggctgaagtgagaggatcactggagcctaggagttcaaggttgcagtgagctatgatcgcaccactgtactctagcctgggtgacacagcaaggccttgtctcagaaaagaaaggaaaagaaacacaaatgtatgctggtattctcaacttctcttcctgatatataaagccagaagccaaaggtagccttgtcatgcagctggtaaagtcataaatatgtatacattcaatttgcatttgcattttgcttgtacttctgttagatggtgagtcagaacatttaatatcctggaaatttttttttccccctatggccagagccttcagtagattctgtaaaacatcaagtcctaaatgtatttgttgctgaaacatgttctctttgtatcaagtgcattaatgggagttggaaggaatccttcatttttttttagaagctggccagttagaactgtacwttatgtagctctactgttcatttgtggtcttatcaatagagcaggatgtgttactttttgctgagtgccagagaactggggtgggaggaaacctaggcttctgttttattttttttctttttaaaaatcaactttaaacttaatttatgatgaaatttttggggtactgtgtcgtaaacaatcagctgctattgacagagaattgtattcagtcaggttccttttcatatataagattaggtcagggaaaacaggcttgcttttgtacattctattctcaattgtatttacttctgtatcgcttcatcagaggtatataaaggagataatcacacaggaaaacacaggaatcctgcccaaactagattactcttggaaagatttgaaacagagtgattgggacaaggttgcatgttcagtaagctgacagtgccttggtattatcattttaagttaaaacaaactagcactggaataaacaacatgaagtgtgtgttcttgtaggaagtcttctgtattgtttatgggactcaataaacaatgaatatgtaacatgtttgggtaatttacatgatggatgcacagtaagttcttgagactcattttctctaatgtttttagaaaatcaattgtgaaattgcaatgaaatataaagcattgagggtttggtattgctcctggttttaaaatgggtgtgtatgtctttcagtggaagttcaggcaaggrttggaattgtaagtactaggggtccagagattataattatcttgaattggaactaaagttcagacaggactgcagaaagttcattcagtttgtaagagaaaaggtgatatttaagccttcaccattcagtcatgctgagcaaggggtttgtgggggaggataaaattagagcgagccataaaaatgtgctttccttgcttcgtagacagacttaagacatgcagtggattcgacatgtttcatagtgggcttttaatttaatatacactttttttctttctttttyaaaccatgcccatcattgtgctctctggatcacttgatcatatgtttggtaataaagtaaggaaacaaaacagcaacaacaattaaaaagcaatgcaacgacctccttgagggagtagtaagcacatcataggtgttcagcaaatatttgacaatggaaaaggttaagcatcatgttttatttatatttgtattcttggaacttggcactgtgtctggcaggtggtgaggatttaataagtgtttactgaacaatttatatatccaaatgaatatcactcttcgaaatcttgggatgttccataattattctaatgattctattatttttcgaaccattttagaaatattaggcagtctgatagatactaatgttgatagtttatagtagtcctttttttaaatcataaattatatttattcactagactacaacttttttaaccaaaatgcctaggaataattttgcattatttatcttctttaggagaaaaataaatattaaatatattctgtttttatttgaaagtattsagtaagcgtagttctcaaatgcccagagtggcttaatagtgagtttggttcagggtacagagacaagaatggactttaagcttctctaagttaatcagcttaaatatcacctcctcctggcgacttttctgttcttccaacctaaaggagaccttctccatatgttttgttcacttgtcacagggatactgatacagttttgacgtttgtcccttccaaatctcaggttgaaatgtgattccccatgctagaggtggggcctgatgggaagaatttgagtcatatggatggatccctcatgaatggcttagtacactccccatggtaatgagtgagctcttgctctatgagtttacatgagatctggttgtttcaaagcgtgtggcatctcctacccctcccttgctccctcttttacatggactcccccttcaccttccgccatgactgtaagcttcctggggccctctctcaccagaagcagatgctggcactgtgccttatgtacggcttgcagaactgtgagccaaaataaaacctcttttctttatgaattatgcagccttaggtattcctttatggcaatgcaaaaacagattaacacggatacttattcatttatgtatttcacttgtttccctgtgtccaaactcacattcaacccaagattataaactctttgagggcagaggccatggttcataacactgtttttctagtgtttggcacatggtaggtcctcagtaaatatttaaatgaatacatgaataagccccatccatcctgtcaagatgaagtgggccatcatttaggttactcaagctgaatcagactgagaggacagtgcttacgtgttagctatggcagctcctttacaatgatgaccgaaccctttaggatgagaaaaccacttgtttagatgataaattctggcatgattattaagaaaacactgtctctatttaaagactgatttcttccatttacttagaaatgaatagtagtgaacaaagaagaggaaattatcaagcacaaaacaaaacgttgctacactgttaaaatgggctctaaatgtacctaaatcataaacatattcattcctaattaagacactttggtgttcatatacaaggcaattcctatgatgcctcacataaaggtggtatttgagctggtatttatttgaacatcagctacatcaacagtcccaataccatggaagaagccagggcagtgactctgaaagtgcagtccttagaccaacagagtcatcactacctgagaatttgttagaaatgcagatgaggccaggcgcggtggctcacaactataatcccagcaccttgggagcccgaagcaggtggatcacctgaggtcaggggtttgagaccagcctggccaacatggtgaaaccacatctctaccaaaaatacaaaaattagctgggcatggtggcaggtgcctgtaatcccagctacttgggaggctgaggcaggagaatcgcttgaacccgggatgcagaggttgcaatgagccaagatcgcaccattgcactccagcctgggtgacaagagtgaaactccgactcaaaagaaaagaaaagaaagaaaagaaatgcagatgaactctatggatggaggacaggccttcaggtgattctgctgcatacccaatattgccagtacatagtaaatctgttgctccaagtataagcctcctgaagtgttcagtattcccaggtaaacccaggatgtgttgagggagtgctatctgcctgctccttcagaaatatgaggggagaaatgaaaaattctccctctgccagtcttggcttttctcagaactgtgcggatcacaggagagcaaagtattgtgaatagattgggtatctaggactttagatacaatataaaaaagcttttggtagtcacagagcctgccaagtgatgggtattatggggtatacagaaagtgttaatataaacatggtcctggctgtcaaggaggctgactgtgctgagagcttactctgttccaggcactcctcaagtgctgtttcttttcatcaccatgtgcttccaagctgcagcatttcttcactgaagagaaggaaagggaaacctagtcaggttagtagtaacttgtaccagagcacagaaccagtaagggatggcacaaaggttctagccctggcttttctgactatgaagcccatactctttttctctgtttcatggtgtagcacctcaaagtacagttttgaaataagagttttaaaaaggagaacataagcgaatctaaaatttatatctccaaactaagtctttctctgaactctagtttgcataattgacattgcgcttggatatcccaaaggcacctcaaattctacatgttcaaaaccagaatcatgatctgttttctccacatctgatactcctgcaaggttcccagctctgtggtgggcaccgctagtcaccaagtagcacgatcagaaacttgggagccatccttggctccaccctctgcacacaccacatctaatccatcaccaatgtctattgattttgcttcctgaatatctttcccattccatctgcttctcatcatttgtgcggattctatcctagcccaacttcttgtctctctgcaggactgagccagaacctctctggtatcctgagtccactctgggtctcctagaatccattacccatattgtaaccagggcacttgtgatggttggagggcacctgaggctctgctggccagatctctgcttcctgtaccctgccaaaccctcacggaagcacacaaattctgaccccagggctctccacctcagtggccttttgagctcttggacagcctctgaggacttgtttttccaagtagctttctaccctgatgtttttgctctcctggagtccagtcagaggcaggttcataactacagtcaactacttttaaaggaacaggatggaaactccagtgtagctctagggacttgcccaaccctaccgcaaataccaagttcttaagagttctccggcagttcccaaggtgcactccactcactccaacaaagaaccaaagactgctctacttccacagttgcttatactctgcccctgagttcccccaggaccctgcaatatcacatttgtggccaccatagcagagaaattcaccacctgtggtctaggaataaaatctaagcctctcccaaaaggcacctgtctctgactgttgactgtggcttatcctggcagctttgaggaaaaggcctgggttgctttgcataactggcaggatagataaagaaacatgactcaaaatcattctctctgtatttcctcataacaggaaccagttgacatgggtgcaggaaaaacttcctgaccaaggagtggggcctggggctgggggtgctggacagagagaagcacagggatctgccccagactcttcaatggcctccctttgtgcctggagtgaagatgtgggtcattgacatggttccagagccctgcacggtcctggtcctgctgccactccagtctcagatccaccactctgccccttgctgtttctgagccacacttgcaactgccagcttcacaccctctgtgcagcactctcgttgccccctttggaatgttctcagcatyggtcgaccacgcttcaggtcaattctaaggttacttttgaaaggaggccttggccacccatccccagtctaggacaggaccagtggttccctctccaggagggcttcaacagtatgattatttgactagtttcctcgcccccaccagctgctaatcatcagggcccattgcatccccatagtgtcggcacatgtagaattgtcttgagtgaataagtaaatgaataccaatacttctaccttaaaaaaatccttttcgtaaattcccactaaagaaaggaaatgcacagagatcatgaatgaaccacttcatattgccgatcctgtccatgaacttgatcttcaactttcattaccactgcctaatttcacctgtcatgagccgcatttctataatggtagctgcaggtattatccccaaggaaggttgccccaaaggcatgatataaaatatttctggaagaatacctgagatactagtgtctttgtttgcctctggggaggtgaattggctagctgaggggcatggatgggaggggaattttcatcccatatttatttgtacctctgaatttggacccatatgtgtggattacttattttaaaaattagaattgtaaaagtaaaaggaaggaaagcagagcaagagatgtgaaggaatgggaatgattatttagaggaaagaakatggacatgcagttgaaagggggttgtcctgaaaagaattcctgtcttcaaggatacarccagttacatctgacttgctctgcacatctatggagaactatatggcttcaacttaaaagggatgccataacatataacttgacttaaataggtttgtctgatctctcccatcacagaatataacatttattctaaatataaaagctaatagaacctaattatttaagagggaagcagttgttaaggaagaagttagttggaggctaaagcattctccttgaagacatagaagtgcccaagaaacatgaaaaaatgcttatcatcactaatcaccagagaagtgcaaatcaaaaccacaatgagataccatctcataccagtcagaatggctatgattagaaagtcaaaaaataacataggctggcaaggttcagagaaaagggagcgcttatgcacgattgcttggtttgcaaatttgttcagccactgtggaaaacagtgagaaatcttggagatttctcaaagaactgaaaatagaattatcattcaacccagcaatcccattactggatatatacccaaaggaaaataaattgttttatcagaaagacacctgcactcacacgttcattgcagygctattcataatagcaaagacaaggaatcaacctaggtgaccatcaatgatggattggatgaagaaaatgtggtatatatacaccatggaataytatgcagccataagaaagaacaaaatcatgttctgtagcataatggatgcacctggaggccgttatcctaagcaaattaacacagaagcaaccaaataccgcgtgttctcacttataagtgtgagctaaccattgggtacacatggacataaaattgggaacagtagatactggragctccaaaggggacagggaaggagggaggtaagggttgaaaaactacctgtcaggtactgtgttcactacttgggtgatgggttcaattgaagcccaatcctcaacatcatgcaatatatccaggtaacaaacctgcatgtgtaacccctgaatctaaaatctgaaaaaaagattctcttttatgatccaggtatttttagaatagaataagagactggacggtagcatcctataaaaactggttaatataagttggcataacccaagcttgcatttaatctttgcacatagcttttccagttagtcaaatttgaactgtaaataagagaaaaataccaacttgtcttaggtggttcaggctgycataacaaagtgtcaaaaactgggtggttcataaacaaaaacagtttatttctcatagttctggaggctaagagtccaagatcaggtgccagcatgatcaggttctggagagggctctcttccagcttacagatggcaaacttcttctagtaccctcatgtgacagaaagagggagaaagagctttctgggatctcctttataagagcccgaatcccaccctatgacctaatcacctcctaataccatcatcttggggttaggattttgatatgaattttgagggggatacattcagtaccttggatagtcctttgtagcccagtcagtgtgctataagaaacacatcctgtgttgaaacctagtatatacgtagagatataaataatacatataacagaaataaaggtttcatgaaacagtacttagccataccacatgaaatgtcctctgttattttctgttgtgttccctcccaactccaacttccaccatrcactggtcatgagccactgaattgactttactccctactgaagggcagagacctgcaatttatttagaaagcatgagtgcaatctgccatccccctggcactgcctatgatgtgtgtcagcctagaggtgtgcatttactgaggagctgacaggactccacatatagtgctctgtccactcctatgaaaccacagaaagttgtgagtttaaaaccccctaaagactccccttgcaaagttttatcaagaaggcatagtaaaacttggagagtagacatatgatagaactttgagttggacaaaagtgactcagatggctgccttgtctgtcataaaacatatgtaagcttcaatcatcaaacatggcctttaacctgggaaatgtctgtattttttcctatagtgctcaccctaaagttcacactaatttattttagtaagaacctaaatactgtaaggaaaacaatctctgactttaaaaatatgtgaagaataaagaataatttgacggtgtagtttttttcttcctgaaattccttcagacattaagcctgctcattttcattggccactgaagcacaaaattgaaggggctcaaaatagggaacccttggctatgcagaacctttgggcaggctgttttacttctagaaaacatttcctgattgcttgctcctttaactgccagcaattattatggccaagttttgtatagaaaattttcccagcattgtctcatctgtccctgattctttaaaagattatacagaacagagtgtgtcttttatgctactgtaaagtgatagatttagtattcattcaggaatgcaaggctctttgcccctaaaccaaatggccctactttgctgtcttctaaaatcttgtctgctttttcttgataattttttttttggccctacttctgtggctctcagcagtgagccccttcactcattgttggctattgaaagtccattgtgattttgggaaccagataaccatactgtctgaaatgtgtttgccagatagagtcatattatccattgaaactgaaattttaaaaaaggatcaaaagtagtatttgagggaggtcttcaagagttctactggtaaagcaagcaagctttagttctttcttgttcgcttcattcattagccaatagcatgttttcttctgccctgtttttgggttgttcagataaagtgataccttttcaggctgtgataggcatgctttcttttttctttctttttgtaacatattgataatgtgtttactatattatggtctaaagcaggatttcatagactttttcatttaagttaaacatagtggcaattgatgagtattttggtaacagctttatttgcaatgctttatgcctttaaaggttatagattactgcatttctcttttccttggagaaactgcatagcaaagttccccagattttcctgatttccatcttccattggaaaacaagttcaatatccacaataaaacaaggaagctgaatactgaaaaattaacttatttttaaggagtgatgtgaaccagactgttctgaggtttacgactgcattgtatgggaacaaaaagaagcaacggtgtcattgctgtggcaagctgtatttaaatgatgcccttttatttttttcaagatgtgttgttcagactcagttgtgaagattatggaaactgaaacaaatgggaaatcagtctctcctgctaagggttaagagagaaacacgacttttgtttacatttgtttataggaaacagaatggaaattcagcttttaagatgtctgtacagttgggcttcattatttagtttagcagtttctcagaaactccctctcctacatgacaatttataatgcaaacatgatgcatcatttcattttgtgtaaactttatagaaggaatagtcttttccacatatgtcaaaagacttcyggaagcattttagaactgaatgctaagtatcctacacatgtgcctggaagctttagaaatgatcagcagcagcactttctgaccttacatttttgtttgtttcttcatttgtccgcctccttactgaaaggtaaagtttcacaagagcaggaactttgttctgtttactacactgtctccagcacctagaacagtgtccagcacaaagacagcctgtattattatcattgttgaatgaactcattcttaagctataaaaacaaattcttaagctgtaaccgtttttcccttgacttctgagctcccccttcctttacaaaatttcagtagcctagcatctagccttgccactgcttcaagttccttccccgaggagcagccttgtttgttgccagattacagtctttcttctgtctcttgctttttgcacctttaaaagtctagaccaatttaataaccccacgccccatggtctctttgctactcagctgawtttttgatcccaactcttacctctttgaacaaactctatacttgcagctgtgcagtcaccttttaaaaattcagtccacctcccttcccaaatactgtttttatcaaacacaccctcattttttttttaacccacctttgaaattttagcactctttttactttggtcatctctgtctctgtgcagctaccaattttttaaaaatgttctcttctattctcacttctgtctccagatacgtctcttacctgggctggtgtagaaacttcccaaataacttccatacctccctatctacccgctttaagcaattgtaatactgtctcttacctgggctggtgtagaaacttcccaaataacttccatacctccctatctacccgctttaagcaattgtaatacctgctgctagagaatgattttgtcactgccgtggcaggaaatccttagatcctttaccgtgtctgaaatctgaaatgctttggtttgggtacattctggccctagttgactgttgatcattgtcatcatcattgttgtcattgtcatagctgtataacagtgatagcagctaccatttcttaaactcttactttataccaggcataacacgtatgaagcatgacatcatgaagcttgttagtgcattttggagctgtataatgtgataatgggtagggtggctgtgggtggaataagatagggctggagaggtgtatcgggccagaccatcgacatcttgtcagctgtgctaaggagtttgaacatttcttctacaggcaatgaggcaacaactagaagagtttgatggagaagtgatgaggtcatattttgtttcataatggcaacatgagcaatagtttaggggatgaattagaagggtaagagactggagatagggagactaatcacagaagagatgaaaaggacctgaagtaatgtagtgtggatagggaagagtgagtagatttgatattcaagagggagaatttctaggacttgatgaccacctggatatgagttttggggaatggtagtagtagatgattctctggcttttggcttgagtgactggagagattggggaatgatgctcaactgagagagaataccaggtagaggcatcgtacatatggtagcagaggcaggagggctgtgatgatgagtcctattttggacatgcatttgagatacctgggggctatccaggtaggatgtggctgtaagatcaatccatgatggagacactggctgtgttgtggtcatatcatctgggctgtgggagagcatgagatcgaatgagattgagatacaggacatgaaggtggagagtctaaagagaagctgtgtgtaagtgtggaagaggccatgatgaagacacagtattatgagctcttgccagcaattaaaaccatgagactaaatgaaatgttcctgaaattgtgtaagaagaagacagaagatcacttgttgatcttcacttgcaatttcatttccctgtagcgtggctcattccgttgttttcttttctctgtttaaggaaatggcatcagattttcatgatagcatgtacagcctactgtttcggaagacctctctgagcccactgatccccactctgcctccctagaagtgatttctcaggcacacattctctttggtcctcttgctcctgtgactctttgggaactttccctagaggcttctgtttcayttgttctctgcttatctctccaagcagattcgagtcctgacagcagggatcatatctttgcctgctttgtctcccccaaccaaaacctaacagctctttctttattttttatttttattttttgagrtggagtctccctctgtcacccaggctggagtgcagtggtgcgattttggctcactgcaacttcacctcccgggttcaagcgattttctggcctcagcctyctgagtagctgggattacaggtgcctgcctccgcgccaggctaatttttgtatttttagtagagtcggggtttcatcatgctggccatggttggccaggctggtctcgaactcctgacctcaagtgwtccgcccgcctcggcctcccagagtgctgggattacaggtgtgagccaccgcacccggcccttaacagctctttctatactctagctgctcctgctactttttttttccctttttcctctttggaggctcatttgctgaccatattgttgttatttttatttcatttattataattattaattaattttatttattaccatgtatgtatttatttattattagtatatcatataatatataatagttgtagatatgtttggggtacttgtgatattttgatacctgtatgcactgtgtaatgatcaaatcagggtaatgaggatatcacctcaaacatttttcattgtgttgggaacattataattcttctagctatttgaaatatacaataaattatcattaactataatttccctactgtactataaaatactagaacttttcccatctatctgtgtttttgtatccttaaccaatttctcttcatcccctcgtctcccctacccttcacagcctctcataactatcattttattctctacctccatgaratccacatttttagctcccacatacgagtgagaacatggaatatttgtctttctgtgcctagcttatttcaggtaacataatgacttccggtttccaccatgttgctacaaatgacaggatctcgttcttttctgtagctgaataatattcctctgtgtgtgtgtgtgtgtgtgwgagagagagagagagagacgttttctttgtgcattcatccactgatggacacttacattgattctatgtgttgactattgtgaataaatgctgtagtaaacaggggagtgcagatatctctttgatatactgattttctttcttttggatatatacctaacagtgggattgctggatcaaatggtagtcctatttttttttttcttttgaggaacttacatcgttttccgtaatggctgtacatctttacattcccaccaatagtatacaaatattgccctttctctacatcctctccagcatttgttactttttgattttttttggtaatagccattcttactggggtgagatgttatcccgttgtggttttgatttgcatctccctgatgattagtgatgttgagcattttttcatatacctgttagccatttgtatgtcttcttttgagaaatgtctattcaggtcttttgcccattttttaattgaagtatttggttttttttttttttttttttgctattgagttgtttgagtttcttatgtattctggttattaatcccttgtcaaatggataaatggatagtttgcaaatattttctcccattctttaggttgtctcttcactttgttgattgtttcctttgctgtgcagaagcttttcagcttgatgcaatctcatttgtctattaatattttgtttttgttgcctgtgcttttgggtcttacccaaaaaattattgcccagacaaatatcttataagattttcccaaaatttttttcagtagtttcatagttttaggccttacatttaagtctttaatgcattttgagttgatttttgtatatggtaaaagataggtatctagttttattcttctgcatatggatatccagttttcccagcactatttattaaagaaactgtcctttccccagtgtatgttcttggtgcctttgttgaaaatgggttggctgcaagtgtgtggattgatttctgagttccgtaggtctatgtgtctgtgttttttttgggtttttttttttgttttttgttttagccagtaccatgctgttttgattactctagctttgtagtataatttgagattaggtagtgtgatgccttcagcttggttctttttgctcaacatttctttagctattttcagtcttttgtggttttatacagattttaggattgttttttctatttctgtgaagaatgtaattgctattttggtagagattgcattgaatctactccgtatagcgatgtgcagattcaattgttaaattgatatacagatttaattgttaaaatgataagcattttaacaatattcttccaatctctgagcatgagacatcttttcattttttgtgtcctcttcaatttctttcatcaatgttgtatagttttccttgcagaaacctttcacttatttggttgagtttattactaggtttttttttgtagttattgtaagtggggttgctttcttgatttctttttcgatttgatcactgttcacatataaaaactctgatgacttttgtatgtttattttgaacgtaacccttgaaagtgggtatgcttgtcttgttccagatcttagtggaaaggctttcaattttccttctactactttttattgattatttttattctcctctagaagaataaagaaacaaagtgaacaactcaaattttgtacaggtttatatcagttgatgtacctcaaactaaaagtgcctgcttaaaatgtgtttttggctgaatgttctatttctgacttaaaaaaaaagtgaattagcaagaagatctacaacacccagtgcagaattattgtcatttatcattctcactattttaaactctatagaagaagaatatgtcttttggcagttccactacacctactatagcttctcctgagcagagtttatctcctggtctcattggtcaaacttcctgtgttttaaaatggcattttgcatacacttgcacaagttgaatttggatgcagtgagagcccttatccaagaaacacggattctgtctgactcatccggcctctctgctaacactttggtgcgccctggtcaagtgacttgaccctatttgtgcattttttctttttctcatctatggaatgaaaatctagccactggctcctgacctcattcaaagacatgttgtgaggccaaatgaactgaggacctttgaggtccttagaacaaaagcattgcacacattagagaatttattttgtaagaattgcagaaagagatcaggctcagggtagccaccattatagcccacgagtaagcaaatatgagccaagaggtccccataaaggagaattctctcccatcactaaggccaaagataggagtgggacactgctaaagtctgattagagttccagaatttaaacatcaccttcagcatggatgaggagagcagcatggatgaggagagtggcatgcttttatctttaaaaagagacgaaccctgaatgtggacgtttattgaagaaagcaaaactcatacttacttgttaaagaaaaataatgttagtgaactgcaaataattcatgtgagagggtccaaactaggacataattctcttaagtattaaataagtttattgcttattccgtttagtttgtatggtatgtggtagccaacttatcgtatcttctgagtgcctaatgctctgccttgcatacaaggatgattagtgttttacttggtgctgcccatttagatgtaatatgagaagctcctagaagtcacccagaaaacacttttaacacctatggaatctttcagtttgtttgactttaactggacatttctcaaatgctaatgaaaatcttatttaataatagaagtatttaaactaaaagggtgtgattggattgtttgtaacacaaagaaaggataaatgcttgaggtgatagatatcccatttaccttgatgtgattattatacatcatatgcctgtatcaaaataatctcatgcgctccataaatatatacaccttctatgtaccaatgaaaattacaaattaaaaaaattgaaatgattatagtctgatgacctataccaagtgacagaggaatctgactggaattacctggccaaaaatgagggaaactcatagagtataacaccattggcataagtgtcacaaaattggatctgtactcatgacattggatttataataagagccccaaatcttaattctttagttaggctggcagtgaatagagtggcacaatcataatcatacaggtgccgtttctcagttttctgcttttagaatcagattgtggactaagcatggcagacttggttatgattgcaggctacagtacaaatattagcaacctcaacaaaagaaaaagtgtagttggcaggaggtgggatgtggcatcagggaggagagggtgctaatatcctcatttcttaaaatagcaagataagctatagctgttaaaagttgctggaattccacagtggttgtgccatcttgcattctcatatgagagtttccgttgcttcaactctttatgaacacatggtatgatcgttcttttgaatttagatattcaaatagttgtgtcctggtggctcattgtagctttaaattgcatttccgtgacggctaatcatgttgagcatcttttcatgtgcctatttgccattcttatatgatttttggtaaggtgctaaactcttgtattgattctagtaaagttgttgtttttttttttagcacacatattttttatatagacaatcatgttgtctatgaatgaagatagttttacctcagaacaggtgttggcgaaaacaaaaatgaagactttagtacttaacgttgcaaataaattaaacagaagaattagaagaatatattaaacttcaagaggaggccagggcagtgtgaggagaatccttgatatgggtcaagacctagagattcaagcatggtatcaacagttgtaaagataactatcaagagactaaaacaaaatttgaagaacagttaccttgggagaatgaaactagtggcagggataggaaaagcaagagttgatcactctcacgaagtcttctatctggtttaatttattgccttgcacatacgtttccctgaaaaaagtaaattattggcatattggtaattaggacataaagataaaaacaatatgaagtaattataataggtagagggtaagactgaataatataaaataaagaatatggggaagtggtctatgtttagagttatataaagaaaggaggggtcctgaaatgacagtcagtgctgataaacgcctgacacttacttaggctcttgctgcattctaggtactttctaaacaataaacatgtgacacttgtttaataatcacagcaaccatggagtggatactattatcaccatttaatagaggaggtaaggagacgtagaagcactgatactaagtatgttatttgagttgacacagtcaggtttcagagccagctggcccagccccagagccgtctctctaccctacaaaactgcagtgtgtctcatggaaggaaggtaggtgtgataccccacagtacagacagtgggtgctccttcatcctaattaaacttggcttgttctctgaggccatcccctaaagagatacttaactttagttcattcatgattcagcaaatatttgagtgcctattaacacagctctaggtactaggactattcctttccccagtcagtggcaaagaaaaataagtgcattatttgatacaagatgctatggggaaaataaggcaagataaggagtagaatgatggtagtggtggtggtgaggtgttattttagaaaggaaggtgagagaagtcctctctaaagagctggcacatgaatattgtctttgcccattctggctgctattacaaaatactgtagattgagtgatcaagtagcttaaacaacgaacatttatttcacacagttctgaaggctgggaagtccaagatcaaggtgctgacagatccrgtgtctggtgagggctcactttatggtttacagatggccatcttctcgttgcatcctcacatgcagacagcagagaggaagtgagctctctatgtctcttttatgagggcactaatcccattcatgaggactccaccctcatgacctcattattccccataggccccacctcgtaataccatcatattgggggtatggattccaatatatgaatttatgtgggggaggggggcacaaacattcagttcataacagatgaagacctaaatgaagtagagaaacaaactgcagatatggggaaaacattccaagtagaagggatgaatagtaaatgccaagtcctgaggcacagcttgtttggcccacttgagatactgggggaaacctgaatggccaaagctgagagaagtagcagaaggggaatacttgggaccaagacaagtagagctttatgaaccagataatgactttggattttgttcttagtgtgatgagaagccattagagggttgagtgaagggaaaggatatccaacgagaacctcctgccctgtgtctcatgaagaggcagtatttcaagaagaggcttaaagctgagagtgttttgctaatcagtgaagatgtgactaatgagctgctggggaagtcaagccttctgtaagtgaaagtgtttgcattcattgtactcataggtaccttccctaatggtgattgtgagccaggacactagttaaattgtagctacttagaagtggtaattcatggcacacttaatgatttcttcctatgtttaatgacattaatatgttcaatcatcatttaaaaattatctttcttagctctaaagtaataattgcaagaaatgcattagggtactggtatatgggggttgcatagggagaaagaaggaattttgaagaaaggtttaacaagaatttaaaatatttagatgaatggagatatttatatccaaatatattcatgttcttataatatccttcttataagaacttttcaaattcttctacttgaaatatataatttttaaatcactgattattgaagagtaggagtaaactcttgcyttctgttacctagggcaaagcatatcttggttcatttctgggagayagaaaaaagctctagtctaattgatttttccagaatagaaaaggaaaataatttcttaacatgttcaactgtattaaaatttatattaaaaccaatataactaagattatctaaaaggcagtgagaaagggaacatatctatatctatacacacataatggtcagtatcccgaatatgtaaggtatgtgtrtaattatacaagaactaacctttatttggataaatggccaaaggttaggtactatcatttttatacatgaaaaggaccaacatagacaaaagtaatcatccatagtaatagtaaaagcaatacaatctgaagtaactgagtcttaagaaataaaatgataagttacaatgttggcatggctgtgtagaatttggtatttgtagatttttgttagctttcaaattagtatatacttcctaaagggtaccaacaatatttaacaaaagccatttcattgaatatacccgtagatccagtaatttcccttttsaagggaaaataagtcaaaggagaaaaaaaaaaatcttgttagaacaacattcattatagtcatgaaaggctaaaaatgacttcgatatctaacatttggggaaatgattaaacaaaccataataattcataacaatagaatattacttgcagatagaatattatggagaagtctgtgtgaaattaagtgaaaaaagagacataatgttgtgaaagactgtttataagcaagtacactgatcaggatgaaaaagcatagaatggttacatacaatttgcattgatgattttgtttaccytttaattgtgtatttggctgcatatgaatatggcatgaagaacagaagaaaatataattcacttaaaggaggtatatcataggatatagaaaataatatccagggtcaacaagatttggagcacctgatacgaacagccaggaaatgggatgccartgagggtctactctatgcttccaatgaaagtgaggatggagtaattgaagaaatactcctcaagactaattgaaactaacattcattcccaaaaagtaagccatgtcagcagatgagatttatttttggattaaaaaataacttcacagaaacttttagatctgttatcgcggcccatatccagttacaacattaaatttttttctatatagaaacagatttctaaattcttaacagatatcacactttgagtaatgtcatatacaagtaaattgcagaaaagcagagaatttcagccaacagaagtcactgtagtggactttgacctggactttgttgtgaaataaaactcttgagcttgtcacaccaagttgtattggaatgggacaataaattccaaagattcattgagtccttaaaatgggtgggtaggctttatgtatatgctgggtacaaattcaaatcgactaggttggaaacaagaaaaggatgaatggatttcatgattgttttgaatttagaattttgaatacagttatccaatatttcttctcccctcttttcatgagaaaggattaccctgaaatggggccaggcaggccactggtttccttgaagtcttagttgaaatatgcttcttcaatcattaaccagtaaacagatatgacttccataatcttcactgtcaaggaaagttacctttagcacatgcctgtggatccctttcaatatgtgtgataattttggtttcaagggtcatgtgttatggtcaagtgctgcttcagaatcttagaggctgttctagaacgcttgatgtctaaagcttgccatgtttcaatttaacatcagtttgtgaatatctgttgtgccaatatgatttctggtatccctgatgtctggataggacgtatatattttgtggggaaaacagaagaggtgaagctaacactgcattgtgtacactggacaggatcagtgatgatccagttcctttgtcttcccagcaaagaacagcctctgaaatgaggctgatgttgaccacttccatagattattgagagggttaaccgagataaaggaatatgggtggcaggaactaagtaaatgctacttcctttcactttttatgtgcaaagtattttgaaaggtgtggagggcaaaggggctaacgttttagactgagtgggtggttggggaggcaatcgcaaaaacaaatgtgtgatccttgctgtcagggaatttgcaacaggttggaggagccaggcaaacacactcaattaggggaagataatgcaattaaaagaaaggtggtaaaagtactgaatgtggctggagttagacagccttaggattgcaaattaagcctttgaggttagtgcatgtgatggtttgtataacccaaatttgaagaaaggctggtacacagggcaaatgcatrctaggaaaatactctgagagacagtcacacactttaaaaagtgataaaatgttgtaattatactgtttacttttgaaaactgcctattgttcacttcactgtatttcaggaagcattttataataagcaaactgcaacccttttttaatgtktgtggaaggaggtgtgggaagtaatggcgttgactctcagccacttctggctggtctctgtcttcragggattcctgagcctccaccgaagcaccatgggtggggctgctgtgaactagtcacgagctagatttgcttgctagccactcctgaaattcttactgtgatgttggaatagggaggtggaggaaataagtgttttatttatacctctcctttgggacttaccacctttcaaggtgtagtttcagttatttgcaggtgtgtcttatcttccctgttggattgtaaattgcttgcgggaggaagggtctctcgtttatttttcaataaacaaaatgttgtcaaaaggaattccctttactccaaagtcttgctgattgaattacatggatcttttttgttgttgtttatttaatagcactattcaagagtatctgaaactatatcagtattcatttagtctttggcatatttgggattcaaaggaaattcattctcttcccacgtctaacttgtactctcccggtgttagggatcaaccacagcatgttttagagtcttcatctatatccctctggaaattcagaactttgaccacctactgtttgtgcagaggagatcagaggaggcacttgtctcacatctgatagctaaaccagatacgtgggtctggtaaacagaagcaggtggaacccaaaagaagacaaattgacacatctaacaaatgtaagaaggccattgttttccctgggcatggctttttgggagagctcagagttaagtagcagttgacatgacagaaatggcaagaacacagtggagtagaaaggtctgctgtccctgaggcaaagccgggtaattctttcttggaaagagtgggcattacaattgattctggcacagtgggcaggcatccatgaaaagctcataatccgttgctggtgatgtggaggtgggttggggggggggcggcgcggtgggagatgatgatgatgatgacgacgacgatgatgtggttggaacctgtaccaattttgatgctttgcacatccattgaattttggtgccctcttcctcatagcagaagggaaagttatttgatctaggtgtgggcygcaaggtgattgtaaatgctcatgtacttgtgtagttgaattggtggtaacttatttttagaagtcctctaagaagccaaccatccaaccacaaaatttccagtgggaaatgagaagcagattgctgaagagaaccttgctgcttgccgtctgtacacatgcagtatggcactaggtgctggttattcctccagtacaatggttaatctcttgcctgttccaccaaagcgtgtgagccaggctggcattgggctccaaactgcagagccttgcatatttcgtttttctctgtttgttcattttgtgtctaccagtctaactggttgacgtgtgaagcagtgtgaagaatgagggctaaccgcagtgcttcccaaagaatttttaaaattgctctttcccttgaatcctattgtttatactatgcacaaactctgtgtgacatttagatttgggggagaacaattgaataaaatttttctcagtcagtttgaggtcacagaccaagggtttttctcttttcttctgagatccccacttattgaaatacttagactctttttttttttttttttttttttttttttgagatggagtcttgcttattcgcccaggctggagtgcagtggcgtgatctcagctcactgtaacctccgcctcccgggttcaggcaattctcctgcgtcagccacccaagtagctgggactacaggtgcaggctaccatgcccagctaatttttgtatttttagttgagacggggtttcaccatgttggccaggctggtctckatctcttgaccttgtgatccacccgcttcggcctcccaacgtgctgggattacaggcgtgagccacygtgcccggcaatacttagactctttaaaggatcatttaactagtatatttattaggaggcagtagaatgtattgtggtgattaagagcttgaatttgggctgaaattctggctctgcaacttccatgcaaccccacgaaagtcacttagctactttattcttcagcattttcagctataaaatgggggtaattatattcctacctcattgacttattgttaaaaactcaatgttaagtactcaaattcttgctaatatttattggacaatttgattgatcaaggcacaaagtatatacagaaaagtagatgaagttcaccccattaaagagtttactacagtgttgttgaggaaatacgcatgtgagacacaaccaactgcctgggaaytcaaagtgagacaggttttattagagttcagaggagagaaagatcactcctatgtaggaggcacacagaattaataaagctagaagaaacaatagaaagggaaagatgtcttaactgggagggaaggaccataagaacaaaggctcaaagctacgtccaacatatctctactgctttgttgagtggttgaccagtgaagactgctggtagcaggcagatgggtccagaatgtataaaatggactggatatagaagatcctcctcctttttctctctacttatttttcctctaatgtgatgactgctacctgctcccatgacattttgctcaaatggtcttgaaactcacaaggataagaatgtccctccagtctatacaaaagggagaaacaggattgataaggaaggaagaacatgcttatctataaatccacaatctgatggaggaactattctgcagaacatttggtgaggttaaaagaaaaaggaaagcagcccatcatttgattgttgtaggaaccttctactagccaaacagatggaggctgaggctgatctgttgatactgggcaaatggcaaaactggaaaaggcaataggaggtgaccatctcagcttctgctggctgagtaattgggctaaaaacaacctagtgcctttcggcctatttttgtcacttttcagaatacaacaaataaattgctatattggatttaacaccaaccattaagaaagaatgactttatggcatggaagatggaggagcctttgatgacagtggtcctgatctcttggaagttttttttaacaaactttttatatgagaacatgtttagatttagagcactattacaaatgtagtgagagaattcttatataccccataccagtttcccctatctttatcttatattagtatatacatttgccacaattcattaactaattttgatatactactgttaatactttattcagatttgctgttttcccctagtgtcttttttttttttttttttttttttttttggtggttgttcttgttccaggatcccatctggaataccacgttatatttgtcattagatttgtcatgtctacttaggctcctctgggttataagttgacctcctcttgatctcagctcactgaaacctctgactcccgggttcaagctattcttgtgccttagcctcccaagtagctgggattacaggcatgtgctaccacgcccagctaatgttttgtatttttagtagagatggcgtttagccatgttggccgagctggtctcgaactcctggactcaagtgatccgcttgcctcagcctcccaaagtgctgggattacaggcatgagccactgtgcccggccacaaatagatattttaaatatgacaataatacatgctttggagaaaggtaaagcaggataagggagtagggggttctgaggtggaatgatgggactgttacttatatacagcagttgaagaaagccccattgctaaggtggcatttgagcagagacagggaggaagcaagggaatgagccatgcgcataccactaggaagagtatttcaggcagagggagcaaacagtgcaaaagcctgaagcaggagtggcttggaacactccaggaatagcaggttggtccatgagcctggagcagggtcagccaggtaatgagatggagtgagtgaggacaaacacaaatttgggcaggtggtgtctgggatggaatcacggaaagcgcatgtgagtggctgtcgtgggagctgtgtactgctgtggagttgggctatagaggtccttgtggggacttggtctttttctttgaggagagaggagctattggaggcttttgagcagaggaatagggtcatctgatttcatatttgaaaaggaccactctggtcactctgaatgttgcagaagtagaaagaccagttaaaaagtcttttactctactagtatattttatcttaatctattaatcttgatctatttgtatgcatatttcacatgtagtaattgtgtacatacagttttgccatctgtgtattttaacattttttttctgttgctctgtagtcctcaggtttataacattcagtggctgcataatagtttgtgtattagtctcctactgctgctgtaaaaacttaccacaaatggaatggcataaaaggatacaaatttattatctcacagttctggaggtcagagtcctaaaatcaaggtgttggcagagctgcactccttctggaggctccagggagaatccatttccttgcttcttccatcttttagaatccaccctcactccttgactcatggcctctcactccatctttaaagccagcagcatcttcaaacctcacctctgcttcagtcaccacttctcctattctgaacctcctgtctcccacttctacacacttttgttattactttgggtgcatttggataatctccccattttgaggcacttaatttaattacatctcgaagattccttttaccatgtaaagtagtatattcacaagttctggggattaggatgtggacatctttggggacattattcagcctaccacagctgatgttttgtagtttacttaaccattcccattgttgaatacttagaaggcatccagtttggggccattttgatattcctatacttcctataattatatactttgaccttcttttctttcagattgtgtctcttaagataaatatccaagtttaggtttcctggaacaaagagcatgaacatcttatgtatttgcttccaaatacagttaaattattggtaaatatataaggatgtcagtttccctacaacgtcaccaggtttgctttctgtcaattaaaggtgtgtttccagtttgttacaaaatgacattttattggtgtgtttattttatttccttgctggctaggttgaacctttttggagtgtgcatggcggcatatgtcatttgtattttgagaatagtgttatgtttattttgctttttagttgtatctggagctagaagaatggggacaggattagactattgcttaagtaagggcataaggctagcatgaatagatgatgtatgcagaactatgttgctttcaattctccatcaaaggaagtgatttccaaaattaaaagggtgttactaaaagggatttggatgacaatgaaagaaaatccaggtaatttgaatgcatttacctctctggggcacactggattgtatcycagggttagcagggttgaaggagttagcaggcatcatctttgagccattgctggtgattgttgagtgaacttggagagtggcagaggttccagaagaccagagatatgcaaatgttgttctatatagcttttgacaaagttgaattcctaaaactttcaatgtgtgaaatgcacccttgcaaaatttctgaactatcatcatataaattatttaggagtccagagaagagattgcattgatccttaggaaccagcataaatctactaatgcgtagtgaccaattgtcacattttcttttataaaaggggcttctatattggaagataatgccaaagacatcaaagcatttgacaaatatctctcaccggtctccttacgcacataatagagagatgttggaggatgacagaataatgcaataaattcatagctgattctattcatatgccataacataggtaatgactgagtgttcgtcagcctagaargaggtttctagtggcaggtatttagggttttcttggccccaaactgaagcaggatccttagaacttggatagaratctgaaaaattcatatgtatgtggctgatgatgtaaacctatagaataaatcttcataatatgaactatgaaaataggccaacaccaactaggtacatttaacagaaataatgagaacttctaaaattgaggttgtatttataattgaaacaacagttgattttctttatttttggccgtcttgaatttcaccaattaaaaacagtaacacttgtatagtgaaaatgactttttaaggttaattcatgtatggtaggagaatgctgggtccacctacatatggttgctatgagagcatgctataataaagaattgctggactgagaggaaaagatgtgagtactgttcctgtcaccaccataaactagttgtcatcttgggccagcagttggcatcaccttccttggatctgcgtattctcatctgaaagctggagatgacaaggggtggggtgaagttagtcactttgctccattccggctgtcatgtgatatsaggcagtacaacttgattctcatgttccttggcgagtttggccaaatttctagacttttaaatggacccttccacatatttctagcttaaacagaccctttcaggccctctctgagaaggggccccttttcttttaatctgcaagttccttcagatcacccttcttcaggatcatattaaactatccacattttcaacgcttcaatccaagtttcaaacagtgtacttgagcccactttgatctcaggaaggccaacattttttttttcttctttttgggctcaggcccatgcctcaacatttctggatgagcctataccctcttcttcaccggccaaaaaagttctccatggctttaccatggggtccagccttcagtttcttcattctccgtcagccgaccctgaacaatcctggccaccgttggcatttgatcatcgactgtttctctagcttcctccccagcaccactattttgattctgctgtaatctttatgaccatttaattttgaatttttaaacttcatattttattttcctatttcatatcttcacattatcatttgtaaaggagtttaaaatatttcatgtgcctcgatttactcttgcatagtctgattttcccctcttgtcagtcctcaaatatcatcaactctttgttttctgctcttatgggacgcaacatttgtacatcttcatacaatctagcctttggcttcttttgtctatatacttagattaacctctcagagttggagatctttgactgagggatatagtagtatagttcttgatccattttgggtacctttattttgactgacaaagacaagaggccacgttagcacattatattctttccttaaaactttaaaatatttaagaaggcagcatttatatttaaacataaatttcagcctccttcttggggcttcccttaataccaaagtaattttggttggaggaatgttttgcaggctgtgatatctcagattgcaacacttctcagcctgctgtttcctgtgcttctcctccagctccttccactgagaattctccccaggcagcattttcacgctttcagtgctcatttcaggcactctctgctctgctgtgcctatgcatgcttgaggctttgccctaaactcatgtgacctgcatagctaatttcaggttctcagtctaggcttactactgctgaacccaagagactgatgtattgcccagactcctgcacgctgtctgccagccacaggtacattctggggtcatgtattatgctcctggttagcacattgggcagggaacaagctacccattgtggctgtgaccaggtatagagtctctgcttatctgaaaaacagttctttgacctcactacctgtggccattccttcctgctactgtgtccttgatcagccagctccccaccctttgcytagaaagcattcccaatccctaccagtaagataaagggagcaaaacagaaagccagttctgtgtggcccaaggctctgctatatatgtgtttgcatccagtgtctgaattttctcyctgaagaaatggaagatcttgggayggatcttttggtaagatttagatgttgcgtagctcctaacaaggctktataaatagaagtacttaaagcctttaggacatggayactctcagaaagtgtttttagtttatctgatttctatacatgtttttgggctgactaaatgttaagtagttctaatacagtatgatacaatgggtctctacagtctcttgggttcagtggaagttaagtggctgttacatgtgtagttcacaacagtagaagacagaaataacctgtgtcttctccataatcacagagatacctcgcataaggactaaggtgccttttaatacatttttatcctgaagctctctgatagtggtcttctatgcaatgcgggagttcaaacttcataactagcactctggttcagtagctctgatgaaatcactggggctcctttagcaactgaattgtttgcatgtcataaaattatgatatgcttcaaaggcaaatatttatttagtgagaaatataggtgtgcacagtaaggcttgtgccttcctcatggcgtatttccttatgaagttcattagtctctgactctaggcaacgtgatataatgggagtggcacagaccataaatgtcacaagatctgagctcaagccatggtgtagctagttatccccgagttggaagacttcaggctcagaagccacttggtgtgtcagaggtcttttacctacaaacctgagagggactgggggaagttttagatcaggtcatttctaagaagtcttttagctttaaaatctcaaattagtatttctaaatgccattttacccacttttatataattacttgcccatttaaccacacttagaaaattaagaaaaaatatatctactctttcattctckaacacagataaaatcattgttcatgttctggagtattagcttccttttttctgagcagatatatctaagaatgcctaaaacagtgtgtgtacatacatttcaaaaattggaatcacatattttttcataaattgatttttgtttcatttaacattatcccatgtcatctgagtagaacttagagtttttatccaaaactagatttccttggtcacttttgcagtttctttggaattttccatatcgaaggcaatgttatgcactctccaaactaagcacccttggcttctgaatgtgctgtaagtacagtcagttgattccattccagagaacaagcagtagaaatatcccagagcactctgccttcttgctgtcactgcgtgggtagagactgccatggccaggggtcaaggtggaggatgaggggtgacccctaaaaaatgatattagcatgtgaccaaacagtgtctcaaatcgtctcgaaagcccaccaatccattgtggaatgacctctacaaatagttttgcttctgcacaaccaggtgagatggagctgactctaagcaaagagatagagaagggaaacttggtaaccaagccttttctttctgttctctgcctcccttctccacgcctcacctcttcctctctttggcatttctcttcaccctctctagccccccagttatcactttctcctccatgggcccgttacattttgttcatgctgctgatagagtccttatcacgtattactaattggaagatttgggtggtagttgttgggggtggggagaaccagggtaggttatcatggccctactcataagaagtttatgtctcctcacttctatatgagtttcagaactggaagataatcttagctgaggttagaagaacatgtgaagctgaaatattactgaatatttaaaaattattttccactattacttgtttccttgcatgtggtttcaatgacattatgggttacattggttttggtggccttgcttagaatttcaacatcagagagcctatattaagaagtcctacatttagtgggaagttttactacatcactagatgtactataaggtcatctagtttctgattctaaagttctatgatttgtagcactgtttccatgggaaagtgcattccaagttctaaacagctgagttttggatctcagctcctttgagagttgtggaccagtcagacacaaaattatctttaaatatacagataggggtatgtaatttgtgttgtatgtagaactaaccaccatttgagcccttattatgtgtcaagggctataataagagccttcatacattcacttattcccctcttcaccatgattgtttgaggtaggcattattatttccattttacagatgaggaagccaaggcccagcagagctgagatgtgactgcagagccgtccaaccccagtcctgtgacctttctctggtgcctgatacctctcagcatttgagggccttttctcttcctgcttcatctctaaaggtccttctaggagagaggtgaaaggtaattcttttgaaaatacctattttaaagcrgtattattcccttcgagagacccattgattccctttgatggagcccaataccatgctggatctttgctgtttctgagtggtgtgaatgggcagctgatgtgggtggcctcaggagcctgtagaaagaggtgccccaggaaaatcttttacacaaaagaacactacagcatctgactgcaagattcaaataaacacactcaaaatggtctgtagagaatagagtggtcaacaatgatggatagtaggtctctctctttttaaaaacagatttaattatagtattcacacaaatctaactgaaaatatgagccagaatgttcatttgttcactcactcatcagctgtcagactttgaatgaacgcacatatgtaccagattttgtactaggccctaggagggtacaaaagtggatgaaacatagtccctgcttcaaggagctcagaacctagtggggagcaggcccagaaaccttcagatcctctgctgtgcatttttaaaatagcccaaataccaaaactttttttttttttttttcgaaacagggttgtcgctctgtctcccaggctagagtggcacaactatagctcacttcagccttgaccttccaggctcaagcaatcctcctgcctcagcctcctgagtagctgggactacatttccatgccaccatgcctggctaattttttattccagtataaagttggggtttcgctatgtgcccagtctggtttcaaactcctgggctcaagtgatcatcctgcctcagcctcccaaactgttgggattacaggcacgaggcaggcttggcccaaaatgtcttttaatgtcagttttgaatgagctttcataagaacactgcatatgtgtgaggagaaatccctttcacwtggtgtagatttggtaagcaatatttccaatatcagaaagacttggtcagtgtatgttgatttgccaaaacccactggcatataaggatgctgtggctgttgacttttcacatttgcttaaccaaagtgccagtttattgaagatgagttctgtgtcatgttttactgccctgcatgttaagatttgcttttcatgacactaagacaatgggagattgaatgggtggagttaaagaggcccctgtccttctattgattctccttgggtttcctgctgagtatgggttgaggctctggccttctcmactgggtgccagatgaatgtaccgggaatcctgttagggtgacatctaagaagaagactcataaagcacaatattgggaactcaatcagagcttgtttcaggaggatcagggctgagcttagtgggggttcttggtgatagggattccttcctgaaacacatttgtcttcctggaaaaggaggaaggtgtaagaacgagaaccactgatgtatgcaggaggtccgtagcctcagttgccatagatactgaaggctctgcatggcctggccaaggatggacaatgttacaaggtggacccacaaaccacagtgatcttcatcctcaagctggggcatgctgggcctcatttttggaaagtacattttccacgagatgtgctaacacaatggggttctatgtataatctgccttgaacaaataggtttcatgggaggccacgaaaaaacaacttcatcaagtctcccactctcccattaaaatttattcagtggaaagcatttcccctgttttttggatgaaaacatatcacgtggctattctgattcctcatatataataaaaagccccactttaatttgccagatatttaaaatgtctagtatcatgggatagttaaagcttccagcttcattcatatttataactgctccccttcccctggctagggcctgttgcagggagagggggctgtggttggaggctttttctcttgcttactcagtagctatgacttctggactggggtgaggggctgggtggggaacaggaaggagtgtaggaaagcttttactaggcaggcggtatcataggagagctctttttgtgttgtgggtgtttagagttgattctttctcttgtggggcccttttgtgggttctttggagataccctctcaccttgtctctgggggcctctcacctccaatttccttggtggggctgctgcactctcttcagcctaattgcagactgtttccacagtctctagaaagcccaccaatccattcgtactcctgtctgctgggttctattgctgtccaggtggcccttgttgggaagaccctaatatatagccctgtacatatgctcatggtgtggtccatgggaaacactcacacttcctttgttcccaccaactgggagagggcaggctgctcccagggcaactgtcgtttcctttggcttgtccgtcagcatccagccagctctccagttcttcagatttcttaggcagaagtcccaaacaaggtcacagtgccttccacatcgtaagagcctcatgctctccaggtagtcctgttgagccccctcatgaggctggaagggggagaagcagggaggggcaggtactcttatctcttcctaagcttagtcctttaggctaggaccagactggactgcagcctgcttgcttcaatcattctctccttttagccaccaacaagcagtctgacctacttgtagccacaccgtaggtaagaggtttaagaccagtgaaaaaggttttgggctatgttctttgaaaaactgcatctaggcctggcacttcactttggaacctggtatctcatccatcttagcggcttgtttgacacatcccattttgacattctgtaatactttcttgggaagcagggcttatccttagctcttggagatgcacatgacacacagcatagaaaaggctcctgggagtagacaggaatgtccacttcactccagcctcttcctctcctgccctccatcctgctccaagggcctgtgctccacctgaatcttccatccaggaagctccctctctgctgcctgctcccactctgtgttgccagctccttctgttcctttaggattccttaatgttccttccttagtaaagacttctttgttcaaaccccacctaartagatctcccctaattttctgttttctgttaccgcaattccctttatttccctcacagtacatcttatattataaatgataacgtttccaaataaattatacaagctatttagtgtcttactctcacatcaaatggtaagccccataaaggaaaattcatgtctgttttattcggaaactaaccagtgctcactaaatatatgttgaataaatgaatgaaagcatgaattaaaaagttacttttgtttaagctgttctttccccacatgtctctcttcttttgtgttaactctttttttttttttttttttgagacatagtcttgctctgtcacccaggctggagtgcagtggtgcgatctcggctcactgcaacctccacctcccgggttcatgctactcttgtgcctcagcctcccgagtagctaggactacaggcatgcatcaccatgcctggctaatttttgtatttttagtagagactgggttttgctatgttggccaggctggtcttgaacttctggcctcaagtggtccacccacctcagcctcccaaagtgtgttcactcttaacaaacagattcttagttatatggcatgcacagagttttggaagtactgagacaaggcttaatttttggtatatttttctgttcatcatcatctcccctcaccctttctctcctctctctgtctcactttctctttccctctggctctgtctttttctctcactctcttctaacaagaacttagtttgaggcaagtggagcagaggtgccaccccatgttacagatacccacaccaaggagagttagctgtgagataacctaaggggttgatggcaggcatggcccagagctcagcacttccatgtctcttctggtcttgtcctctctgtgcctctcctgcagtcctttgtgtccagctgtcatctggccttgcagcaaggcctggcttaccacttccagaacctgccgaggtagcagcagcctggcctcgggctggagtggaaagactagttcccagcccagaatctatcttgcatggtacacagcaagagaaattctcttcaagatgcagccccatgaaagcagcatgtttacaggtagtagatccccaaagttgtcatagcctcccctaaccccctcacaccagacctgtccctgcccttggcccacacagttggggattcatgggctatgggaatgtctttctccttaggaatagaagctggattctgaaggaaggcgctggacttgaactaggcttggcgatcgccttccctctcattctttccctgcctactccatagacagtcctaactctggccacaagtcagagaatttcacattcctcccttaacaagttttactccgtataaggccctgggggcagtctagatttcctgggcaacaacttgggtgtacttgcttcaggaggaggaggaggcttatctcgtatgtgcacattcttctggtgtgtcctatctggttattatcaaatcgaaactgcagcagttgaagtttgttgcttaattactgtctgttgattgtaaaataatagaccaccaattttgttggttagttattactgccacgtcgttataaagtgcgcgctgtaacatggcagtgttttcctttatgctgtctttttgatgagtatcattatttacactaataataatggcttgcrtttgaaatatgcttcagagttaacacagcacttccattttattatctcatctggctctgttataaggaaatgcaagcaggcaactaattttaggagagttggaggtaaaatttttattctagaaattactataaattttggcataatatagcttctttttacagcaagtacttattactttagttaaaaaatcagaagcgaattttaaaattgtagatttgctgttttttttacaccttcttgtcataatccaaaaagtagagtactagaagacatattcagtccagggtcatataaaatcataatatcttagctagaagccactcctctagaatttgatccacagtatggtttaacactacattgtaaggaaatggattgtctaccccagagtttgcttagcataraggcttcatttatgtatttatttaggtaaaacttatagaacataaaattaaccattttattatgaaaaatggaggtgaacactacctctatctagttccaagatattttcaccattccaaaataaaaccccatcctcmctaagcagtcactccccattccctactccctgtagcccgaggtaacccctaatctgctttctgtttctgtggatttaactgttctgggtagttcacataaaaggaatcgtacaatctgtgtcattttgtgcctggctgctttcacttagcgtaatgtgttaaggttcatccacgttgtgacttgagtcagtgcttcattcctttttacagctgaatgcccaatatttttaatatcaaaacatttctgggattatggaaactccagccccacagacacacagtcccaccatatccttctctccactggsaatgacttctcacaaatgtgggattttagtccataataaagtacaaatgctaaagaagcatgtgtagttatagctgtaatttgctgcattttactttagactcaggaagaaggctctagatagttctatgcaaagattacaggtgattgtattcttcagacactcatatcatgaaagtttgtgccatcataatttttacagacagtgcttagaatacgcctggatttgtagttttcttgcagtaggcmccactcggcggctgagtttcagatttcttttcytttttttttttttttttttggtttgagacagagtttcactcttgttgcccaggctggactgcaatggcaccatcttggctcactgcaacctccgcctcccaggttcaagcgattctcctgccccagcctcctgagtagtgggattacaggcatgtgccaccacgccctgctatttttagtagagacggggtttcaccatgttggtcaggctggtctcgaactcccgacctcaggtgatccgcccacctctgcctcccaaagggctgagattacaggcgtgacccaccgcactcggccrggtttcagatcttttctccagcctctgtaggtgacaatgtataaagaaaaaagaatgagcttctgaggtggacagagctgggttcaaatcccgcctctaccccttgttagccatttgtccttgggcacatgacttgaagttccctcatggtaaaatgagaataataatatctactcatggtcccccaaagatatccacatcctaattcttagaacttgtaaatattaccttattttgaaaaacagtctctgtagatgtggttgaattaagaattttgaggggattaccctgtatcattcaggtgggccctaaatattttacaagcatcctaatgagaaagaggcagaggggaacagagagggacatgcaggggaaggtgatgtgaagacataggcagggagtgaagtgatgtggctaccagtcaaggagtgccaattctggcagccaccaggaactggaaggggcgagggacagagtccccctgtagcctccagagagagcatgaccctgccagcacctcagtttcagcccagtgacattggttttggacttctcgcctccagaactgggagagaataaattttcgtagttttaagccaccaaatttagtgtaatttgttacagcagcctcaggaagtgaatgcacttctcttataaggtaacatgaccacctgtaaccacatgttacagtttgttttcctcctaaaaaggacagaagtccttctatcaaaggtgtttctcaagctttaagtacagaggttaagagtttgagagcagggcttctcaacctcggcactaatgacacttaggggccagaacattctttgttgtggggcggtcctctgccctgaggatgttcagcggcattcctatccactagatgccagtagttccttccccctagttacaacaaccacaaatgtctccaaacattgccacatgtcaactgggggacaaaactacaccctgttgagaaacaccaaggtagagtacaaattaagtacagcttaatcccagctccatcactaagtagctgtgtggccatgggcaagttaggcaccctctctgagccccagtttcattatctataaaataataacagtccctacatcacagggttgttgtaaggatattcaaatgatgtaatatgtgtaaaggcttcagaacagtgcctggcaaattgcmaagtatttaatgcaggaaaatggttattaacccatgctctgccatgctactttgtcacactgttttccatagtttctgttatagaactaatggccattgaaaacattttccaaacagtaacttctgttgtaaagatgcacatgttttaatattaaacatccttccttcattgccctcccctctcacctttcagctccccaggatttgtatgcgtagattgcctgtcagttatgctaactcactgaactctttatataattccctggataagctgtaacaacaagcaaaacccttccatctgtcagtgatagttctattattccataattacagctttctcgtcggtgacgtagctgttgcattcacttatgaatgtgtcagtgtctccattcaaatgtgtgaaatatttagcagcgtttagcaggttttggtgaaatgttagaaagtgawttgaatagataccatcatatacttttgtaaggaagaggaacgtgctccaactgtgacccaggtcactgtatctctaaacactggagacacagcagtgaataaaatgaagatccctgttctcaatgagtttgcattctagcacactagaatacttatatgcacaataaattagtaaatggtatcgtgtttaggtagtgataagactatgggaaaccagcagtttagggaagggggttgggagtgctgaaggtggcacaagggggcaggttgtgatattagaggggacagtttttaatcctttcatggggataatgaaaatatctttgacatggattgaaaaccagtgtttgttgatgcacctctgctgatgactaatggttggaattcctaagtctttcaaaggtggtgaaccttttgctccttccccacagactgcctgggagtgcctttcaaagttaagccatgtggctttggtttatcccagctgctgtgggaattctttatagaaacggttcagggatcattattggcaatgcggtctcagggaagaagtatgcctggtagttattgtaaagtggatgactttgggcaagtcgtgtaacctctaagcctcagtattgttataacggttgtaaggttcaaatgaaataatgtatagaaagcacgtagacctgtgtcaagagcataataaattcttagaaaatgttggtagttgtaattttatgattagctttaaagcatatttctaaggtactatgtaaatattcatggcacttgtcatttctttctaaagcatacctataattatcagcttttcataggcaaacatttcttgcataaaccttgcctgccaaagaagggtctgcatagagaacctatgaattgatctcttgtgagcttaggcttggacactctttgaatactgtgtgccaactttcacaaagattgagatgagagaatagaggcagggagtaattcaggtaataaaagtccagctactaaaaatgcagttttgtgattagttctcatggatgactctagagattgacttttctgggtaattatatggcccttcattttgttggtagggatttacatagacatttgttaaatgattttagaatagaatgagttgcctagttatgctgagtgaattgagaaattcctcaaagagtcatgggcttcattgggaaatggtcaagatcaaggatggagcacatctggaattcattgctgcactgcaaagaaagtttgggaactggtagaagtggtagttacacaacattgtgaacatactaaatgtttactttaaagtgtttagttttatgttatatgaattcagataataattttcttaaaaatggatttctgacagtgctagacctcaagctcagattccctattttcatatctaattatttaaaagaattgttaaagaatatgatagtccttaacattttatatatatggaataaattttctttaattttataaatgtattaaaggttttatatttcagtatatccaacatgcttgttttctcgtttataaaattcagttattccaactctaaaattttatggtaataaattgattacacaagtagaggccaaagctgtatccccacagtgtctattatggtatcttgcccatagtaggtgcccaataaatgttcactgaattgtatgtaggttgttttctgagttgctcataactttataatgtcatacattaatgcaagtggggttaaactagacagtgttagagatcttcaagttcagcttgctctaagatgagcaacaaggcygagaagttaggtcacttacatagttagtgcaagggtaggatattgctttttaagttaacatttgtagaaacatgcataagtaattcattcagccatagccattggaatatggtttggtttcctttttattctttctttttttttcttcctttctttttctttctttccctcccttgctgtctsccttgctccttctcttccttctttcttttcctttctctttttttagatttacaaacctgataatgcagaaaaatcatgtttctaggggactgcaaagcccatatttcatctcatcttttgccaggagttaccaatgtatcctttagtcagtcttctctggatttttcttacctcacctattagatgagaagggtagtgcttattttcaatggaatgctctgcttttgaggttaatttacaaaaactctttattggttaaaattttaactctctttctgccatatggtgcagatatttccttcaatttgcttgcctttcagttttgtgaaacaaagatttaatctctgagattagttgttagatctaatatttttctctacgattttggctgttggcatgctaagataggtcttttccatcctaccattacataaattgtaccttaattttcttctagtacttttgtggttccattttttacatttaaatcttattgcatctgatatttatttttgtataaggtgagaggtagggatctaacttcatattttccaaaatgaatagccagttaaccaaactgatttaagaatccatctttttgttacattaatttgaaatgccgtaatgaatactgaattctaggctttttttttttaacattttaaagaacagaataggtaagaacagaataggtttaaattcctatagctttatgacacattttgataacacattttgatatctagttgtgcaagccctatctgaatggttaaatatggtttatttccccccacattttcttgattttttttttttttttgagactgagtcttactctgtcacttaggctggagtgcagtggcatgatctcggctcactgcaacctccacctcccaggtttaagcaattctcctgccgcagcctccctagtagctgggactacaggcgtgtgccaccatgcccggctaattttgtttctttttttttttttttttttttttttttgagatggagtctcacaccstcaccgaggctggagtgcagtggcgtgatctcagctcactgcaagctccacctcctgggttcacgccattctcctgcctcagcctcctgagtagctgggactccaggcgccagccaccacgccttgytaattttttatatttttagtagagacggggtttcaccatgttagccaggatggtcttgatctcctgaccttgtgatctgcccgcctcggcctcgcaaagtgctgggattacaggcgtgagccaccgcacacagcctaatttttgtatttttagtagagatggggtttcgccatgttgtccaggccagtcttgaactcctgacctcaggtgatccacccgccttggcctcccaaagtgctgggattacaggcgtgagctaccatgcccggcccttcttgaatattcttcatgattgttcttctataagaacattagagtaattttgtcaagttctaaacaaaactgctagtgggatattaattgtaactccattgcatttctgcgtttatttaagggaacattgtcatctttacagttaagctttaacattcagcaggatggtgaatcattttattaatttaagtcttcttttatgttccatgatttcttttttttttttgagacagagtctcgctctgtcgcccaggctggagtacagtggcgcgatcttggctcactgcaagctccaccccccgggttcacgccattctcctgcctcagcctcccaagtagctgggactacaggcgcccgccaccatgcctgactgattttttgtatttttagtagagacggggtttcaccgtgttagccaggatggtctcaatctcccgacctcgtgattcacccgcctcagcctcccaaagtgctgggattacaggcgtgagccaccacgcccggccggttccatgattttttaatgttagttctgtacacctatcttttgaatgtattctatttgtttatactctttctttcttttatgaatgtgaatttttaccccattttattttttacctggctctttctagaaattagggaagctattgatttttgtatattggctctgattttattttcaggtgattctactgaattttgtcagtggagtttcataacatttccaaataataattttatcttccagtttacattatttataatttttactgctttggctaatacttctagaaagatattaaaataacagaggttatatgaggcatctttttttctgattttaaagagaatgtcactagagtttcactatcataaatgatttgtgattcttgtcctacagtactctggcagtgctagtctcttttttttaaataacatgttatctatatgtgatcttcttgacatgtagcagttgaactctgtgaaaatggcaactatatttacctggaactctatgtctaaacagtgaccaattgatcaataaataaatacattttattgtgttgctctttctgccttgctgaactttgaaagatctgtaagaatttgaagtgcatcataattgttaggaaagtagatcaaacatttatgtaatgtaaagcctttatttttcatgcagcattgtcaagaccttagatgtacagtgtaactgaatggttgaagtttacactcatacttcaaaaaagaaatgttttccttttgttgtttgctgactttggagactgctttcctaaagaatccactttcgtttttactactgatctgtgtttttggatagcaccatggcaccttgaaagcacatttatgagtatacctctgcttactgatatcacaagaagtttgcaaatatcacaaatatattaggtgctaatgtcagaggaagatactaattcaaaatgtattcatgtactttcatagatatagaccctttttgtttcttactgctccctcatacaaagaataagttgctctgtataagtaacacaagatttttcctccttaaaatgtggaaaatattgaaaaatagagggaatataagcctgttactagggataaccactgttgatatttacagttgttttgtgtctgagtaattgctatcacactacatactggtttgtatactgtccttttatctaaacattacaatcacatgtgtttttcctagatggtggaacatttaaataagacaactaaagttatttaggctagttgggctgtgggaatctgaagtaagaggtggtctgtgcaaccttagaaatgggtggagccggaggatgaatcgcaggatgaactcagcatggttcacccacagtcttcaaatagtcattgatccaggtgtcctcagagagcctgaaaaacaatgcttagatcatcctgcctgacctctaggaagcttaaggtcacctgaacaaaataatccttttctttcagcaactgggtggcctctgaaagctggccctactttgccatctttgatcagtcgtctggcactgattacagactattaacagtgtagactcattcctgttgtgcacaaagaatcgtgtggagaaggaggctgcataaattgtcttactcctaagaccaaattccagggacttttttagggcctttggccatgtgttattttatgtaaatattttttaagacctccctgtttgacaggtcagcatgtctccttctattgtataatattaattctagaaacttatagcagatccatttccatttccaaagccgaaaaaggaagagcttgaattagaatttaatgtgaagagtttgtaaattgcttatattcttattttgtcagcttgacacatttgtggaaaaaatagatgtctaaaaatgtctagtagctgctatgcagtctgcagtctgtgtattcattcttcatttacagtttttgttttacaaggtcatctgtaaattaacagcctaccaacaaacaaagatagtattgcagagagtaattttgaacatctttttgtcctaatcatttttgcatttcaattaattgaaaataaagagaattagaaaagaattttcttttatctttcaccttgtttgaggattctgataatgtgtacatatgttattcttctctctatatgttttctctatcatttcttctttgcaccaaacaaatatcttatatttttgcctatatttccattttctggaatttcagcttaaaatacttgtatgcatctcaatctttagaagagatttagaacagcattgtctgatacaaatataatgagaggcacatatgtaattttatatttcatagtatgcacatttaaaaagagaaacaagtaaaactaatcttaatgatatattttatgtagcctaatatatcaagaatatagtttcgacatgtaatcaactatgaagaattattaatatattttctattttttattcagactaaatctgccaaatccagtgtatattttatacttatagcacatattagtttagacacgcaggtttcattagaaatacttaatctgcatttagatttcataactttcataattgaaaaagtagactgacattcccaagttgttccaacatacttagcagtttcccaagaacagaaacaagcatcaattttttaaaaactttaattaccattatataaaatttaaagttcaccctgtcagttacrggcttatcaaatactaagtggctgcatgtggctagtagctagtggctatagtatttggcagcacatttctagaattttaattttctattttaaaagacaagattaaaatttcagtaaaaaattacatttgtgacatggaaggtggcttaaaagaaagaggttggcattactggccaaggtagcaaaactcagataggagaaacttcagagacctagtttcattaaacttagctctggtttatcgtgactgaagagaactagggggcttcattatgttaaaaaaaagaaaaggccttgaaaaatgtgagttcctacctctttctctctgaaagagtcggtagtggaggatgcttgttttagacctttggttatactcctgctctctctcgtaaattctttaatatgactttctaagaatgctctgaccatgtgtggatactaagccctttaaagagtggctgaaatatgtgattttaaaattatttttaatttaaaaactgatactcatttagttattagaaaacatttatgtatgtttggagcaactgggtatataagtctactttttcaactgcaaattttatgaaatctaaataaagtcagaagattccagttccagataagatgaagtaaacacagtttactctgactctgccaccgagtgcagctataaaacctggatagaatgcatgaagcagctatttgaggaccctgaaaagtaaatagtggcaggacgatgaggggaaatgaccagaattggaagctccaccaaattgacaaaagagaggtaaatctggttcctgttacttcactatggctagaagtggaagtctctacaaaggctttgaaaactaaactgatgttggaaacgtaacccacrgaaagrggtttagaacttgaagcctgaagctattcacgacaattgcctgctaagacaaaaatagcaacattctcagtaggattgaaacaaaactcagaatcttgtaatagagtgttccaaatgtctaggatacaaccgagaattacttggcatatgaagaaccaggaaaattatccatttttatgaggaaagacaattgacagaggccaatactgaaatggtaaagatgttggaattatctgacagacttttaaagcagctcttacaaaaatgctcaacaagtaaaaacaatcacttctgaaacaaaaagaaattctcagcaaatgaatacatgatataaagaagaaccaaattaaaattttagaattcaaaaatgcagtaaccacaattcttaaaactcactaagtaggctcaataactgaacagaggtgaaagagaggaaagtcagtgaatttgcagatagctcaacagaaattgtacaatacgaacaacaacgagaaaaaggattgcagggagaggggaagcagagcctcatggacctgtggaataataataaaagatctaatgttcatggcatcagaaccccaggaaaagagaggaaaaaaagtatggcactggaataagatttgaataaataataactgaaaaatcccaagatttggcataaagctacagattcaagaagctcataaaaccccagacatgaacccaagtaaatctcactgaaacacatcatcatcaaactgctgaaaacccaagacaagaaaaaatctcgaaaacagaggaaaagaatgcattacctgtagagaaacaatgatttgaatgactgtgtatttctcmtcatggagaaagtgatataacattttaaaactactaagagaaaataattgtcaactcagagttctatattcagcaaaaatatccttaaggaactttcagacattctcagctgaagggaaacttaagagaattcattgccagtagtagaccttgtataagacaattgctaaaggatgttcttcagacagaagggaaatgatgccagaaaagaatttagaacatctggaatgaaggcagaaaaatagaaatggtgaatatctggtaaatacactagactaatcttctcctctttagttctctaaaatatgcataatggttgaaagaaaacaaatgttgtctgatgaggttttcaatgaatgcagatgtaatatatgacaactatagcataaagcagggagtaaggggactcatggcgtgttaagatttttacattccagttgaagtggtaagatactcttaagtagactgttaaaaattgagtacagcatgtgtattgtgatctctagggcaaccatttagaaaactaaaacatgtcaagaaaacataataaagtggaatactaaaaaatatacaagtaacccaaaagaaggcaggaaaggggaaaccgaggaatgaaaaacggaagaaacaaacagaaaacaagtaataaaatggcatccctaaatccaaccatatcaaaaagtacattagatataaatgttctaaacacaccaattaaaaaacagattgtcagaatggataaatacaatcaatattttcaaagaaaatttaacacctgaaatgagatgtgcagtaagtataaactgcaatccaaatattgaaaacttaatagaaaaaaatgtggaatctcattactttttatattgatttcatgctgaaatgttttttgtgtactgagttttaaaatatattattaaaatttcacctattacattgtatatttaaaaacatgactaccagaaaaatttaaattacctgtatggcttacattaaaatttccatcagacagcaatcttctaaggtatggcttttgtaaaaaatgaaaagaaatatttcaagcagcaaacagggttggtcagaagctacatttttgtattatcttagttaagacattaggagatctggattaccctttattaaggctaacaaatgtagggctaaatgtattaaatttagtaatacaatataaaacaattttggtgtgcacaacatctgtggctagctacaagctcagctctgtggcacagttcatgtaactcagccatgagcacagctctcttttggaatgggtcatccatccattgctttacctagtacttctcacaaatcaataamaactactctagttaatcagaactaaaaatattgttgtcaaactactctttctctgaaaaagttactttaaccatacattccaacctgaagcaaacagaagtcctcagtgaaaaaaacagacaaacaaacaggactattccaatgaaatgcaatggaggtggacagtgaaacgtgggagttaagttatctatgaccagtgtctagtggtgtttctcattagctgctgaggctggagttctgtgaaaaggagaattcatacccacatttctcagagtgagttgttggcctatctagttgttaggactttgggacagtccatgagtgagagacaaaccatgaaggtcagctcactctgctggactcttcctctaagttgtggtttaacgtttagctaacagagaccccattgcttatctctctgtcctcacctccagactgtaagctccttgagtccaaaaaaccatgactattttgcttaaagctctgcctctagtattagcataataatacgtaggagctcacaaatatgctaaaaataaatgagcatatgccaaagtctcatctcagccaagccttgctggcaggggatggaaaggtatttttggcttcattctaaagagtcctattctcaaattttcctgttgacatgttctacctcataaaaacacatacatattttctgatggttgtaatctggcagatagtgatcattttggttttagttttagttttatatgtagcatttaatcctagttactagtagcataaggaattggagaataattggagagagagagagagaatgaagattcttatattggctatgcaactaactagctgtgaggcctggagtatggtattacccaagccttctgatgtggatattttcatttgcacattaattacatggagtggaccagatgttcctctctgaggtctctctggctcttgtaaaatggaatgaatcttgcatgcacaaagcctcaaaattccataccaattcgaatatatttcagaccattgctataaaattgctgcaaagtattatggtagagaaggcaatgatcattaagatatggtagtctgctggagttcttgtctctcctttgggggaagaaataytcacatgctttagagattacagaaataatttatttcttctctgaggtgaaatttcctatattcatttcttattgctgctgtaacaaatttatacagaattagtggcttaaaacaatgcaaatgtattatctcatagttctggaagtgagaaggccaaaattggtctcactggactaaaattaagatgtctacaaggctgccttccttttggaggctctggggaagaattcctcttcttgccttttccagattctagagttaggctgcattccttggcttatggcctccttccgtcttcaaagctgcagtagctggttaagtctttctcacatcataccatttgtacactgactcttgtgcctccctcttaaaagaacccttgtgactacactgtgctcactgcataatccaggataatcttattttaaggtcagctgattagcaatcttaacttcacctgcagccttaattccccttgccgtgtgatagactatagtcacagtttccaggggtaaggatgtggacatcttttggcagccattattctgcctatcgcattgccatctttctgagtttttaaagttttaaccaataattgcagagctagtaatttattttcctctgttcccttttcgcactctgaattagttaatggatggcaggaatcaactgaaaaaattagggctaagtaatgtcctggattaactgaagagattctcttcagggaaagctgtcacaatctccagctatttcttaaagctggttatgtgtagaaggttcttttacctaagatcatgttcctatccacaaaaagacagaaactatgtccttttaaaagaaataaaatgcattatctaagcttaattttttttatttctaatcaaaaatatcataaatgtttgccaaagttcattgtgcaatttttttctccctgctgagcaggtggctgaaagtcgtggaatgttgtttttctgaatacagattcataatgcccatagtgaacatgctcattaaaatagaaaaattagactgtattaatttgcatttcagtccactcttgggtagatttgttatgtgtagttctcactataattatctgcgtctttggaaatgccacatctatttgcagattaattatgccattatcaaaggcttagaaggaaatcttcaaaattcattgttaacatttaaagaaaatgcacaggaagctgatatagaagagataaaccagagatttttctgagtgtacttatagtgggcaacagaactaacacttatctttaggttaatggtattatttagacttgcacttatgaagtgttgatttagaggataatacattggttaagagggctcagtggttaagttccatttcacatttattgtgatctctgtttcagccacttagtcacttagaaacgtttatgagtgtatgggatgtgccacttcctttagaagacaatggggatactatccttagagctcccatactgtacaactccacgtgttaacattttcctcactctgtagtctatatgagtggtaccctctggagtagcgcagttatcgaatatgaggcttaatgcaaggatcctggcattctctatgacagaggctgtgcacagtggggaacagattcacaaacagactcatgttatgtgtgaatgggtacatayggtaataagagcacagaagaagggagcatctgacttttcttaggatggaccgggatatctgggtttttcagaggaagctttgctcaaacagagtcttgaaggatcaataggaaatggtgagacaagaaaaagttggatgattttctgggccaagccagcagcctgtgcagaggaaaagaggtatgcaaaagcatgctacatttacaagacttgcagatatttgagtatgacttaagtgtgagattcatgtgggcatgtgaatgaggcaaagcgtttaaccttcctgtgctttacttccccatttagtaaaaccaataaaacaacactacctaccttgtggggttttgtgagttttaaatgagatatcatcagtaaaatgcttaggttaggcttgatatataaaaaagcactcaacgaatgtcagctgcctttgagacgatgatgatgatcacaatgatattacatgaggttgaaaaattaggcaaaagctacagattctgtgctaaggagttttgacataatactgttggctggggaaattgtgaaggatgttaaaaaaaaatacaattcacagctctatagatttataaactccgtgtcatcatttagcaaggctgattagaccccatgaattgatgcatactacttgaaatcatttagagagactgatgaagaaaaatgccattttatcaatttacactcaaaatagaaaccactcagcatgctgtgataattatggcaatgaggtggtgtatttccttcctatgaattggtaaatctccttgagctcctatgtgaacatcacatggtttcttaagtgaggatgaggagagtcagagtaaatgtagatgagtgctttgaaaggctggtggattagccttgctcacttactacatgtctggcagggagatgagaaacaggacctggttggtaccttctctggaaatgctggttacactctgatcttctcctccctctccttttacagatatcccttttttggacacccctctactataacttcttttttttttttttttttttttttttggaatcatcacctttgtttcagcatgctttcaggagatgtcaatggttttccagttcatcttgatttttttaaaggtggctgctctttggtgatattttggggtttacttttatctcaacaataagtggtctccatagtgttcatctattcattgcattcagcacctaaacagtgcgttatttttgggaatagtcagttcaacccatccactgtgggagaattcacagtactattgattacataggatggcattttcacttctaaatgtcatcttattttcctaacttgttgttttaatcatctctaacattagattttgagatccattctgtttgaggacctgtagttcaatgaatgagttgggagtataaaatttgtctcatgaagttgctatatttgtataataataagcttaactcatcaagttactactgtaggcctttagaatttgggtatctttctagtgaatgctttagggatataaacatttattttactggattttcatactactgtttaatgctataatgttaccttatacattctaccaagcattgtaagctcagacaaattaggcaataatttgtcaaaacaaaaagtaataatgctagcaaagacaaagaatttatgctagttacaggtgataaactaaagctttcctcgtcctcaccttcattctgtggtctcttaaccataaacatcaatgtagcaaagaaaaattgattttgtaattgattttgaaattgtaattaccttgatttccttagtgatggttatttaaaatactgaagcattttaagctaaataaaactaattttaaaataaaactaatttttattttwaaaaaaagtggagaaggcccatgtaaattccctgccttttagaacatgcattctgaatattgttttaaagcatttcaacaaaaatgctttgatggaatgctacagtcactgctcattatcttgaattcacttgcaggtcatttgttcttaactgtttttttaaaaaagtgagtgtttacatgtttttactccaaaggaaatcagttacaattgttcataatgggtgcttatttaaaaacgaaagctctgagaaaaactgtgcttctaatttttaatatttcaaacattatagatgttggcattgtgatgaaacaaaacttgccactagtaacattttaatggtcttttccatggagcagttggagatgaaactgtgtcataaaatatttattaaaatgcttatactttactgaaaatttgagggtgtacctgtgctgtactgaattctgtgttctagcaaatatttcataatgatgcctagtacaaatttttattaatgcaacatggagaaaatggtcgttctcttgtctgagttggattaaagcaaagttccaagcagaagtgccagagctatttttaaatgtacaaggcatgcatttttttcttttaacataaattctccatcaaaataggacctaagattttaagaaacaaatataatttattatggctattttgtgtttagagagatactaatagattagagaaagtgatttgccatttattgagaagggccaaaaagcacattaaaatatccaatttgttagtaacttttgaaaatgcaaacttaaaaaagtgccactttttgttatctaagtctaaggctaagaagaatgatcataccaaggttgaagtagaggtggagaacaagcactgtcagatctgttgggaatgacaattgatgtagactttctcaagggtgatgtgtttacaagaagccttgctatayatatcctctgatctagcagttccactgctggaaatttaaccttaggaagtaattggacaaggggccaaaaaataagacaatgatattcatgatagcattgtttctaatctcaaatattggaaacaccttaaatttccattagtagataatcaaattatggctcttttatccactgagtaccttgtagctatatagaatgatattgtgtaggaaaagatggcataatatggtaaggaggtgacaacttggtatgtataatatggttaaaaaagaatgtgcactaagacttggtggatatctataacaaaatgttaacagaggctaccactggataatggattgcaggaaacttttactttgttttttgctgctttttttatatatgaaataaatacatctcttataagcaaaaactattgttataaatgtatctatctttgatttagcacttctactttgaataatctgtccaacaaaatgaacgtacaaagatcttatataatgttcaatgcagcactgttaaaaatagttgaaaaaaattaacctacctgcttatcccctattagaaatatgtataagaaggtcatggaatagccatacttcacagccattgaaattgaagatgtaagtctatatttactgatatggaaaaagtgttcacaacaaatatggaaagggcaagttaataaacattgcattatgtagataggtaggtatgtacacagataaaaatctggaatgctttttattacagtgtcaaaagtaattgtttctgggtgatgggattgtgggtaattttcaactatttttttctatgtgtctgtattttaaatttttttacaataaataaatatctctttattaccaaaacaaaggtaaaaaatcaacaatatcagatatcaaaaaggagaagtaaccaaaaaatattgttaggtactacatgaaacactatggagataggtgaagtaagtggtatttctaggaaaatttactttattaaagtggtcccaggagagagtcagtaaccatgaaagaaataaaaatgttatcaaaagatgctttctaaattcaaagtgcaggcccccagatagcccaagtaaattcttcaaacagtcagggatattgatattaagtagggtaactatatagtttattgaagggagctttaattgagagaaccagtataaactagaatgccccatgtaaacctgacagatggtcacattactatttcaactttttctaagtatagagcaaaagacagactttcaagattttttaagataccaaaatgatcttagtaccaaaacttcacaaagatagctggcatgggcatgtgcctgtatgtgcacacactgcagatcaatcttgatgcaaaaccctttcataaaataccatcagatagaatttagcaatgcagtccgggcgctgtggctcacgcctgtaatcccagcactttgggaggccgaggcgggtggatcacttaaggtcaggagttcgagaccagcctgaccaacatggtgaaaccgcgtctctactaaaaatacaaaaattagccaggtgtggtggtgcacacctgtaatcccatctattcgggaggctgaggcaggggaatcgcttgaacctgggaggtggaagctgcagtgagccgagactgcgccactgcactccagcctgggtgacagagcaagactctgtcttaaaaaaaaaaaaaaaaagaaaaagaaataatttagcaatgcattaaataaataccatgatcaagtaggtacatcacaagaatttaagcttggctcaataatggagaagctagtccacatattagatgaaaaaagaaaaacctgtatggtcatcttaataggtgccaaaaatactaaaattcaacatccactagtagattaatttgggcagtggttacatgactgtttaagtttgtcaaaactaactgaactatattctttaaaagggtgaattttattgcactaaattatatgccactaaaatgaacttttaaaggaataaataaaattataagtttatagtaacaaaaaaaactgacacacattcccaaataaaaagaaaaaaattaaaacttagtaaaataagtagaatgcattcccatttaaatcaaatatataagaatgctgactttcactgaaattataaactgtacacggaaagtaccagtcaggagataaggaaataatagacataaatattggggaggaagttgcaaagttaacattatttgcagatatttcaattgcacagctagaaagaatcaactgaaaaattattggaaacaacaagagaaatcagtaagatggatggctagttataactatgccggtgggaagagaagtgggaagaaaaggaaaaagtggatgtatacatgatttgaagtttccaccatcattcatatgtatgtgacacaccccaggccctacactaagtgctgcaggacactttacctacaagacacagtggctgccctttttcagagaccatgtagccagagacagaagttgggtatacataaaaatgacaaaggactttatggagcagtgatcatcaaggggcagaagaggaattcacagtcctggggaaggaaggcatagactgtaaagtaaggagagagaagaatgggttgtcagaggtcacagcttgtcctcagagcctaagacagcctttagaaccttttgattaggtctaccctatgtttaacttttaaatttgttttttagttcaacatctacaaattgtaagcatccacatttttaaaaatctagatttttaacctctattaaaaaattagaagcttgggcaatgtatggcatccttttctgcaagggcagctgttgggtggaattgagcagtagctgtcagccacctttaggtgcctgggtctctccagtctgttaagtgcaaatgctctattctctcagtactgtcacccattagttatctatctgttgttggcccttggaggcatttcaatagaaacccctggtgctaataataaagtaaagatactgggcaaaccttctccactcttggtcatacaacagtacttttaraaattagctagtcgtagtcgccctgttgggaaaagccacggaagcatttgaacaaatgatgaagtgtttgcctcagtaaatgtacaacttgtttattcccagtaatgcatccctatttccccgtattattttttaaattgaaaaattattttaaaaattgaaaaagaagattgagaggctatctttgtggggaactggccattgtctacatcttcctcaatgcattctttcttttgaattctgaggcatgtgcagaatgctttttagcccagggaaatctttctgttctgtgacacatcattaagattaattgagcctttcaattttacattttccaagagcaaattaagtaggaaaaatgggacaggttttcactgtcacttatactgtgtttttttttctagcttatattctacatctgatggtcagatctgttaggtattcgaaaagcagtagcattaattgcattttcccttcctttttgctgaagggcagatgtttttatgttgttaatggtgggttgggttaaacataagcagcacactgaaagtataactagctattatttatgagaaaagaacaatgtaattccccagatttggctaatctaaaactaaggtttattttatagactttaaataaataaatatttataacctataattttgcccttagttctatgccctcaatacactctaggcttttggtcccatttgtctttccttttttgtatcatcggtatttttcttacctctagttatttctggggaaagaatgaatgtttaaggaaattctgtcctcaagaacacttccgtggcctgtcaaggtggcatgacattgcttgctttcctctcgttcttcatgaaaatgcctagcagggtacctggcacccagttggaacttgaaaaatactttttcaatttgaattagccaaattctggaaaacgtagcctatctcactgcctccagtttcttaccacctgcctacggtgtggctcctctcatctgggttttccacgccttctctcctaggcctctactagagctctctccagatcaccagttcctgccctgaaaaatcaacagtccttatttcttcagcatttctcacaagtgacctctgtccttctttatgcaacaagcagcactcatggaatagaaaggtcttcgctggcttctgaatgaaaattcaagaacctttctttctgctcactcttaggcaataaaatgtcccgctaccatgtcaaatcactgtttcaagctggtatcccaagtgtccagtgctatgtaattagctaagcctccgacttcattatacctactcctctccctcaggaaggggagtggcaagtttaaaatctcagctcctaaggaggggcatgattctcttcctctcttttcctgccttttgccaccagtcctcctgcaccttgctgggggtctgacttctcagggtaaaaataaggatgaaggagagaaggatctagaataatttgagtattgacttggttgtctggagagattgttgtgcagttcatgctcaaaagaagtggactggtaccagtctgcggcctgtaaggaaccaggccacacagcacgaggtgagcagcargccagtgagtcttactgcctgagccccgcctcctgttggatcagtggcagyattagattctcatagaagcgcaaaccctactgtgaactgtgcatgtgagggatctaggttgctcactccacatgagaagctaatgcctaatgatctgaagtagaagatcccccttccactgcccaccccatcccatgggaaaatggtcttccatgcaactggtctggtgccaaaaatgttggggaccgctgctgtagtgggtttggggtagaactgagctcatgtgtagatgcatttgaagaatctgtggaacatatagcggaaatgtatgtaagtaactatatatgacagtctggaaatgtcagccctatctagagatagaaatttgagagatatcagcatatcgatcatagttaaaaccatgggagtggttactctttcatagagaaagagtttaaagttaaagaggaatctagagaccaaacattagggagcaatccttacagacttcatcaagcatcctagctctctcggatgcctttttcacccygaagaaatcattggctccttctgaacctcagactccctgctgatgaaagttagtgaaggtgatttctaaagtccctttcagatctgacatgctgtggttctatccctttgcattagttttcacaactgctttgggacaaatagggcatttactaattgcttaattttataaactcgctagtatctgtaagcctacacaattatatggacccctcatctatctttctgataagcagaatggctgtgctgtacacctcaactctaccaacagtcttgaaagtaaacctggaacaccatgaaaatgacaggtttgaggaacccaagtgtatttcatgtgtgtcaatagggagtgatgaataagagctcagcttctgaagccagacccctgggctcaaattcctctactgtcacctcaggcaacttagttaacctctcctctctttgtctcatttcccttatctataaaataagggtaagaatcctagaaatcgaatgagttaatatacacaaaatacttagaaggctctggctgggtgtgaactaccatcatgtgataatgataatgataagacagccttgtctgatgaaaagggtcttaactgtaagggctgaaggttactatcttagacttatagttttcaaaaggagagtgaagaaaaaaaatctgtaccatttcctaataagtgggaactttcagatggctgagctctgtggatgataaaaattcatttcctactatcaaattgagctacaggtgaaaaagttgtggatactgaaatacagttgtatttagtttataaatttgtatgaggtaggaggaattagaacacacccacccttctttttgttgcacttactggtcatatttagctcaaaggaaaggtgcatgaaaagggaagaaactgcccgctttctccataatactcctttttatcttaaagtgtcttagaggctaaggaattcttggctgtgaagttgtcaccttctaaaaccaaaaaatttccctaaggcatgttgcttatgaatctctaggtttgcagcagcagcttcaaacttcttttgaacatttgacctactcctccaaacatccctctggatgtcagctacgtagagggaaagacacaccttaaggagcagtaactactgagacttcttgaatcttctctcagttgctcttcttattttgtctgagagaggctgggttcaacctgtttgtcaggcacagccaaacatgtgtcctcctgcagtttattgtatgccaagaaggatggtgacatgacagcagtaattcaaaatggggttttaagtgaataaataagaataagcctctgggattagtcccaattgaaaagttcagcgctaccggggagggtagctgctactgttggggattaacaaatggcttgctgcagggaatagtattcactgatccagctgcattttagttattgatggcctctctgccccagtgcccatctctcttcccagacacacagattctgctggcaaagatcttagaaatgtggttttgcccaattattctactcagaaactacctgcttgtatatgaaccttccaattcatagtttttagaccacagaaaatgtatagctctataatactatttagccttagggaagaagatgaagaaagaatttccctccacagaatcaaactgaaagtaagagaacagagaaagccttctggtaagagtagtggaaaacgggtaggatcattttgcgatcacagcactgaatatgtgaaaaaagaactctgttataggccctttactgtttgcaaggccttttatggacaccatattattttatctttacaacaaaaaggctgcatccccacttcataagtgacaaaagtgaagtctagagaggttgacagacttgcccaaagtcccactgctggaagtatgataatctgactccaagtttggttctttctttgctatgtcttgctgtgcactaatacactgagctcttaagattcccaaacacccacccagctgaaagatccaagtatataaatccaactagatttgcagcctttgcatgttttaaagttaactttatacattatccataaagccatcagttcctccacccccttggcaaatggattaatccttcaagggaaggatagtagacagacagacagaagcatttcaccaaagaaagggctatcgattgtattcttcgattatggcctaggagggttttaatgtcaaagagaaggcaccaaggaggttcctctgaggttccactgaggaacaaggagagatatcactcctgttttctattctattcaaaagacttaagggattagagactgggggttagatggctattttaatttaatatcttcctttatagtcccccatggaaaaaactaaacaaagtaactacaatccacaattacttgtttacttgaattgtgctgagggcctagcctgtaagattcttccatcaagtctttgaggcccctttctatctgttcactgtctccataagaaggatatgtctccgtgcaatggtgtgatgccttttcactttatcaaagttgagagggctcagtagccgctttgtacacttctaccttgattttctaatctttgctgttgctctgaagttttaaggattagattaagcaattttaaggtagataacatagagggtgtctgtacttaacgggccctcaatgattatttgcaaattgaatggttggtaagtttctgagataatctattattttctttcatcagaataaccaagtaagttcttggtggccagaattgtgtccttaaatgcaattcttattcttcacatatgttctaacagcccacgctgagttcctatgatgctactttaattctgttccatttcatgaattattctaggaggataccactgagaaggcaacagagccgactttgcttgaacaaaatacacaaagcttgcagttgagaaaataaaaggcaataaaatgggcttcatttcctcctattgctttcttagaagtaactaactttaagggtactgtgggaacagggtcaagaaaagctgatggttctattcttggtgatctgtaactggcttcggacaagtcttcagagtttatgtgaggttgctggagtctactggtgtttagggccccaatgaaatgcaactttaggggtgtgtgtgtttctcttttctctctactgtcaagctagttctcttccactgatactgttgtgtgtcagagagatttggaagctcagcattccagtttagatttctggttagtgtttgaataagatatcttccttccaattgaagtacatacattcttatcctattctgtccttctccatttacattccatgctgtttttgtccatatcaacaacattttaagatctaactttatatagaaacgtgtatacatttcaaatagtttgataatgttttccatatgtgtacacccatgtaaactagcacacatatcaggatatagaacattttcttgtagcccctctcagtcagtcctaagggtaaccactataatagtccccctcatccaaggggaaacattccaagacccccagtggatgcctgaaactgcagaaaccaaatcctgtatgtgtactgctacatagtactacagctaattcatccttccatgttttatgtctggtgcctcttttgtactttcatcaatgtagattctactggacatcttccagaagaggccagtttcattgcaactgaagtctcactcagatagtatcttttttccttgatcaacttcttcaactctgctagaaatgtggcagcagcttcttcattggcagacaaaacctctctagtaaattttatatttgtgaatccaaacctattaccaagtcggtgtaaccatcacttatttgcagtaagtggcttggtgtcactcatttcaggggatcccttgctgaaatcttcatataggcttactgctttctgatgcaacacattgccatcaattggaatgctttctgttcatgtcttccacccacaaatttaatgccctttccatcttcactaagcacttatcacacactgtcaccgtaacttctgcaatttgaggtgcaacagcaaaactagcacatatttctttttccttcttcacaacttcatggatagaggatttgttcttaccacagatcttagcaatctcagcatattttttttcaccttttcacttagaggaagcactttacagcttctatttggcatattacaattgtcagcatcactactgttgtgtttggggccattattaagtaaaataagagttactcaaacataagcactgctacagcagtcaatctggtaactgagatggctactaagtgactaatgggcagggagcatagacagcatggatgcactggttgtagggatgattcatgtcccaggtcagatggagtgcgacggcaccagatttcatcatggcactcactcacagcagcatgtaatttaaaactcatgaattgtttatttctggaattttccatttaatatttttggaccaacgttggccacaggttaaccaaaactgtgggtaggaggggactacttattttgacttctaagttggttttggctgtttggggacttcataacactgaagtcatagtgtatgtattcttttgtacttaatttctttcattcaacattatattgtaactcatccatgttgttgggtaaagagttccattgtataattaaactgtttatggttgtttgagtctggagctattacacataataataataatgcaagaaacattcttgtgcatgtcttttagtagacagatgccctcatttctcttggttatattgtcaggagcaggattccttagtcgtgggctataaatatattttcttttaataggtacagcaaaatatttttcctaagtggttgtaacagttaaccctaagttcctatggttttaaagcacagttttttctgcagtatttttactgtaggttgttgatgctaattaacgtggaacattgaggtatttgccagcccatcttagattatatacatacacacatttttgtattttacattcattcaatttggattcagaggtagaaatttgccttgtcatatatttggaaatttaatagtgaaaaattgccctcagaaattaaaagaaaactatctaataataatattgttctaagtgcctactccctgctagtcactttaaacattctagttccacttattcctcattgagatcttataaattagatatcagattgggactctgtcccaattctagatattgttatggtcatttttaagctatttatttattttaattttataagatgaggtctctctcttgcccaggctggtcatgaactcctggactcaacaatgcttccacctcagcctcccaaagtgctgggattacaggcgtgagccaccacgcctggccctaaactatttatttttaacctaaaaataagtaatattttttaaaatataagtaatattttaaaaatctaatattaatcacaataaagtttaactgtggaatagatgtctggttttgtggcttcacagtgagaatgaatcttgactaagtgtggtatttaattcatgggagtgaaaccggaagggggaaatgagccagggaggttccttggatcctgcctctggcattattcatttgcagctggctacattgcattttatggctgctattttctctcatttgtccttgattccttcgaaaggaagtagtaactcaatatattaaacactgcctagaatcctcagtgctgaacattttaattctatcaaatttttattagcatatcgttgaaaaagaaagaaaacctagggcttcagtttcttaggtcacataatgggtagttccagtaacacacctgcatgggctggagggcactctaaataataataatattcctgatctttaaaaaatatatcaaggtatagagctcttagaatcagtgtagaaaagcctgttagactggattttcaaataatagagttctcttcccttttagacaaagctatattaatccatcctttcattcattatcatgcattcacacaatgattcaacaagtacttactcagtacartgtgccaggccctgttctagatattaagcatataacagagaacaaaacaaaggtctttcycttgtagagcttactttctcagcaaagaaacaggcaagaaaatgtatacatatatgtcatgtggtactccggaggacaataaaaacagagtaaggggcatgcaaatgtagacttggtgttgagaactgcaattgctttttataaggaacagttatgaaagcctctccatcagtattaatatttgtgccaggacctgaaagcactgaatcatacatgactcagtcaattctctgtccccagctctacaaggacaagggtagaaactgggaaaccagctaagatctctaataggtgtgttcaggcaagaaccaaatagcatatatgttttattttgtgggctcatcaccatccttgtgttttattagtaaaggtaattattatgtttatccagacatggacgaacaatatctggtacatttgagccacattgataataatgtagtaatatgaagttaacagtaatatgctgtgggtattataaattgagttctatatttaatgttcttttctacttacctaatattaatttttttgtagacatttcctcctctctcctgtttttattgaataatttgtagcattctttcagccacttacagttgaacttcagtcatttgtrtctcctgttcatcctctgcacagcatgctattaggttctgttgttgccttgtctcccaaatccatctccttctgcctttcccaactttggttttagacctttgtttcgtctcagaattagccatccttctctaattcatgcgaaattytctctttaatccatgtgaaattcagaaaaaacaatacaggtttttgaaatgagtccttgattcaaattggttcagatctttgttcttccgtgtactggctgtagtgccttttgcaatttttgaacctcaatcgttccttcgtaaaatgagtataacaatatctatgcagtgaggattaagtgggattatggagtgtttaaagtgcctagcagggagtaggcacttagaaaatgttggttctttccaccttgtgttcttctgcttcagatctcttaatttctacaactctaaatgtgctattttcctctctcagtaaataatactaccatctcaccagtttaaataaaaaaagctatgagtccccttcgaataatctatttctttcacaatctaaatttaatccatctgcaaatcctatttgttctaactcaacacatatcctcagtctctctgcttctccccattgacactgctacaaccctagtccaagaatcttatctgtactgttgccataggtcctgaattcatccttctgcctccactctggtcttctttcagcctgttttccacagagcctaagtgatatttaaaacataaaccagataatatcagtcccctgcttaaaaccctccagtggcgtttcatcatattcagaatgagatccaactcttaccctctcctaacactcccgctcttatgcttcagcggcactgcccttttttctttttctgctaactcatcaaactcatggctgcctccggccttagcacttgctattctctctgcttggaatactcattccccagatgtccacgtgacttactgcttcttgtcatttagatctcaactctaattgtcccctgacttctatcagtagtgctccatcacaccatcttacttttcctaaggcttaccactatctgaaaatagcctgcgtttctctattttcccctcagtaagaattaaaagttcatactagggcccatttcctagcagtgtttggcacatagtaagtatgctgaaaaaaaaaaaccttgactgactgaataaatgaacaaataaactcacttttaatgagatatcaaggttttatattaattacatgagccaagaattgtggtttcatttttaaaatgtgaggacctactggtttaatccttcatacttcacacatatgcttgtgctggaactatgactgtaaatcaatagcaataccatcctctgttttggcttcttcccctaacctaaatagttctcagatttacttttctctccatctccactgccacactgtcaccttagtgcaaatgaccatcctctctggccttttttctgtaaggttttaatctcccaatatgtattctccagactgcaggccagtgagcttttcagttgctgttacacccatgcttgaaaaccctttaagttttcattgttctcaagataaagaccagaatgtggtctggtccaccacctcacgtcaggccagccctcactctccactccaggccacactttctcctcccctcctggttcccgcctgccaactggctgggtagccgttgcttcccgcttcctgcaaagttctacatcgcacccatttcgcccacttcttcagatttcaggagattgttccttcctcgaggaagccctccctgattaggccaagcgccactccacgtcatacagccccacatcaycatgggcctctctttcagggctttgttttatgagtatgcaatccagaatatgacaatcttattgacatgcgtcaacgcgagcttgcgctcaatagctatttgccgaaggaatatacggactagcggcccgaccactcctcrcccctcccctaccactgccgcgcacatatkacgcattaagcaggcgccgcgagtacggacatcgcgagcgcctgcgcgaagggctacgcatgcgcagaggggccagcccgctgacagattctcggtggcggcggcagcggcggcggcsctggactgcggggaatgggaatcctaggtccctgactgagcacctcccccgcctccctgcccccgacatggctcaggagaagatggagctagacctggagctgcctccgggtacgggcgggagcccggcggagggcggtggcagcggcggcggcgggggcctcaggaggtctaacagcgcccccctgatccacggcctcagtgacacttcgccggtgttccaggccgaggcgccgagcgccaggcggaacagcacaacgttcccgagccgccacggcctgctgctgccggcstcccctgtccgcatgcacagcagccgcttgcaccagatcaaacaagaagagggcatggacttgatcaaccgagagacggtccacgaacgggaggtgcagaccgcaatgcagataagccactcctgggaggaaagtttcagcctgagtgacaacgacgtggagaaatccgcctcccccaagcgcatcgatttcattcctgtgtcaccagcaccgtcacccactcggggaattgggaagcagtgtttttcgccatccttgcaaagttttgtaagtagcaacggattgcctccaagccctattcccagcccaacgacccgatttaccacccggagaagccagagccccatcaattgcattagaccaagtgttcttggaccattgaaaagaaaatgtgaaatggaaactgaatatcagccaaagagatttttccagggcatcaccaacatgctttcttctgacgttgcacagctgtcagatcctggtgtgtgtgtatcttcggatacccttgatggaaacagcagcagtgccggatcttcttgtaactcaccagcgaaagtcagcactaccaccgactctcctgtgtcacctgcccaagcggcttctccatttattccactagatgaactttcgtctaagtgattcactcatcctgagactttctttttgcagtggagagagagaataatctagttggggcaaacactgaactttgtcaattaatttgaggctatttcctatttgaccccttttcttttttgaaattccctgaaatgatgttattctagagaacttctatgtcaggttcctttggatacccttgaattcagtgtagtaatattttcagacgtttccccaataagtgtgttgaagcatacatctttacgctgctaatatgtctaaatacatatgttatcccttgatttttttaaataaytgagagctctatttatttatgggattattaagttctgatgaaaatataaatgttgacttaatcagcatagtaaactgatgtttaaaattccatacttcatgcccacactaatttttaatgttattttcagtggttgccgatttccatttgatgaagaactatacagcttaaaaaaatacgttagttatatctatctagtggttgtctgttttacccaggaattcttggatatttagttttctgggtactgaagtggatgggagggggaatgattaaagaacaaattataaaagtttgaacaaatcttttcaaattaagtatataaaagtaaacttttaagaaaaacatttttaatgagattttaatagtaattctagtcagtcatacaactataactactatagagaaaataaaattttttcctttttttttttaaccggaaagtgcatttgcttgggtgtaatcctaaagtgaaatgggacagtgccttgcagtctttgcccactntacataggctaaggctaagctctttgtactactgcaaacttaaaagtttttcaaatgtgggaaacgtgtgggaaggcttgttgaactttggcgcactcaggtaaacaatactctctcaattgttgatatactttaaaatattcagttgtgcctcagttccagaaattattgccaaacaggagccacagcaatttttggctacttttctgctctgcccatctgtcaccttactggttttcccttgttcaggaaggaagcagctgtttccttgccaacaggtcccttcctctccatctcccaccaaactagggcaccattgattagacaaaggtacagtgtaacttgggtttctgacagcaacaacaggactgtgaattgtttaacctctgtggttaaagctacagcttgagttgactgccttggggatgtcagttaattaaggggtgatgatttgcaagagaaaattagtggagagtcacataggtaaatcattatttaacttaggttttcctaaagttagaatagtcgaatgttcttttctttacctttacaattaagacaaaatgtttaataagaatagcaaaaatttttttatattatgcatccttatacctcacatatcttccttaactagatagtttgacagaaagaatggcatacaaagaggaaaggggaaaaatgactcagaacaagacaaaagctctgactgtttaaagttatcgcttacagagactttaacaattttgtggaatttttacaactatgagagtaaatggaactggtcaactcttgacagttgcctcaagatggagtgaaattgcatcgagggtaagactgtgtccacaggtttaaaattctctcttctgagtaatagtgttcatgtgctcccattctcgaccctgttgttgaaattcaaacttaaatagcctgacttcttgttgggtaacttgccctgcctccagaggtatttgaacttcattatcttcancacaggaattgtyaatcttctcacttcacctgttcttgcattagctcaattgatgtcatcactgatttcctaaactagaaactatggaagcatctttgacttttccttttctctgttggattagcttaatcaccaagtcctgtcaacttctgaaatgaatctcaaatttcttcccttctctatctgttgcccctgattttgccttaagttcttgcctgagtgatctcccagcctgtcttctgtctccttttggttcagtctttatactgcctcttgagtaatctttctgaaatttaaacttgatatttttcgccctcttgcttgaaaacttcacttgcttccccatttcctactctttaaggaatgatttctttagcctcagatagaaggacctttatgatctggccatattctgaaatagcttcaatcctctcctcatctctgttccagtatacatctttccttcttaytctgcaaacattagaccacttgatattctttaaatatgtcatgtacttttcttgtgtctgttctttgggataattcctatccttttcagggaggcaaattgcacgtgagtttaagtatgaaggcaatgtatacctgctgattgtaaaatatttaaacattgtacatatctgtgtggttttaaaagtctgcttttaattatgtaaaattcatcttccctttccacagataacttctgttaacaacttgatatctattgtacaagatgtgttactggcatttccatgtatatatgtatataaatgcaggaaaccaacatgtcattgacacctctcttctttacttttccccatatctaatcattcctcaartcttactgatttttatcagctagaatctatctccttatttctacctctattgccactctgatccaggctaccagcatttccctcttaggcttctgaagcaacttcctaactcccacttgtgctcctcacactcactctggtcggctatccattcattctccatacagcaactagagtcattcttttaaaattgcggacctgatccttccatctcccagctgaacgcttttcatttgcttcctgttctcatgagtatgccaaaatgtattaattctgggctaggaggccctgaggaatttggtccttccctcctcccccctcgttttctgtgcttcgccctcactggcttgcctttcttttccttaaatacatcatgttctctcctattttagatccttttccccgaaggtatggaaacattatttctgtaagcttattcttctatatagatgggaagtttttaaatcagataaggttctaagggcatgtggacaatttacgttatcatagtattgttcataacgtccatcattattctgtagactgtaagggcttacttagctcgtgtaagaattatccttcaaaaagcatttttaaggtattagtattgctaatctataaactttgtgcaagaagtcctaaagtcaatagcaacatttatttaaagtacagtttgtcatacttaataaacctctggtatattttcctttattatgcttgttaaaaacacagtataaatgggagaaatcattaaagatcattaactccaaggctgctggatgttaggacccttaagcatacttaaaagattgattgtaatcaagaataacttgtatcagattgccttccagtgattcacatttattagttcaaccagttacatacctgtagcaagagaccagtttatttggcaataaaattggggaaggaatcaagacttaaatgaggaaagtgagtctgagaacattttttttcagggtgtgtttatagattagtagaacaattttgaagatctaacagaggtgggagtcaggggaatggttgccagacaattgaaccaagaagatgatgatcatttcttgagtagcaccagagaacagaagaaagagttggccttggaaaggaggtctggaaacttatttttcttctgaaacaggagggagagtgaaaaggctaggcaaagatatccataaatgttgaattgatttgttgttgcaggggtttaggagtatggaggtaggtatatgaaaagtagaatttgtttctgattgtgcctattttccaattattgaggaatctaagatacatgaggatagggacaggagatcatttggaagcttgagtgcagtaaaggtttaatgttgcctctgagaatctaaaggagtaagttaaggacaagtagaaggcttattaggctatgatggatgccaggttgcagttggatggcaggcacaaggaagtgggttggattgactaggtttgggaattggttaagtgggtactaggtaaagcccagtgtgtgaagtagttaagggttctgctgaaagtgtagtttgaatgattggctgaggcattgaggataagagaagggagcagaggcttatggactagaccacttttttcagggctttaccttatcagccatgacaaagtatagagaatctggtctcaatgtaggtctctcactccagcagttttgcccacatttttcatggctgttagagaatcagggctgaaggcaagccttgagtgccacttacttggtaaaaaattgtgtcagattgctcactgtagccaagacagagttctttgtggcttctgtaacttgccatccaagtaaaaaaattttcttaaaagttgaaatgacctttgtataaaaagtaataaaatacttgctatgtgtcagggactgttctaagtgctaagcaaatatatcaatgcatttaatctatcactatcatctgaggcaagtgctatcattatcctcattttataaatgaggaaatggagacacaggttgagttacttgcccaggattccagagctgggaggtaggcagcgaattgtggtggttaggaatatagacagtggagcagggtggctgtggtgaggattgaatgggttcgtacacaatgtgcttacaaagatgctgggcaattagcatccttgatggatgaaactcctgctttcacactcagttaacagtacaatatccttcaaagcaggctatccttttatgaagcgattgtttctgatgttagcctttcttatagtgaacagacatttccctctaacttccaccattcaattcaagtccacctttggcaaatgcaaaacaagccttattcttctttttataggtgatagcccccttctagaaatcagaaatactgatccttctctaatgactacttcttccttccagattttagaaatcttgagctgtgtcttcagtatgctgtctgtgaaataaggctatcattgcgtggcagccaagattttcaccagattgtgattcccttatgaccatttgccttcctgggtaggaagtgataaatggcctgataatgtgagtttttgccagtaataataataatgatgtgttaatatttcttgagcattcactatgggtccagacactatttttagtgctttacatttatgagtgtttaaaatcctcatgacaaccctgtgaggcaggtgctatggattcccattgaagagatgagaaaaccaaggccattttctcaagtccctattactgtctattttttttccttttgaatttaggcccttttggtttttttattattattattataaactttttttattattaacttgaagaccatttcccagctaactttagcaacttgctttattttactagtgctgctacttctgttttgaatcaaatgataggtaatcattccttaaaacagtattatattaaaggaacataccaggaagttttttttttagtaataggcaagaaattaaagtgtatagaaggaaatcatggttccacagctttatgtattttttccctatagcattaattttattcaaagatttaggggaaattttttgttttagaacgaaaagggactggtagctaactgttgtaaatacatggtagagtagagtacaaaacaaaagtctatgaggaaatgaccacttaccaagcagcttcacggagcaaccataccctccacggtaaccattctcttaaggcgattgatggaagagtttccaaccggaaggttgggattcagtaccacccccgcatggacaaatgcagatgtgagatcactcacagccatgtctaccttcatggaaaatgagtcggccctctccaataccatgacacgcaacctctggctgcactgcggttatgggattggcttctctcctacttttgcggttatgggattgaaactctcctactttttagaaaatcctgtggaaggatcaggtaataggaaaaaggctggtgaattctgtaaagggaagtgagtagaattgagttgggttagggaaggaagcattttaggcagccaccatggaaagaaggcaggccaccttctcactgacgatgagacccaagtgctaaaggccagcaacaggcagtgtctgaaaactagtctgatatcatcacagtcttcgagggaaaatatgattctactagggttttcatgtcaatagtggactcgaatttaagaagtctccagtccttttgtagaagtacaagtgttttttatatatgagcagaaggaccagaaagaaaccaactcttcttcccatccctccttaatacagaatttatttacttttcttgccaatctttcatttaaagatgtctcgtaactcttctttaattctgtttcctcctccttctcctgcatagatcagatccttaacagacctttccttgacctaacattcatttttcttccaatttttctttctaatctttctttctttttttttcagagacagagtctcgctctgtcacgcaggctggagtgcaggggtgcaatcttggctccctgcaacctccgcctcccgggttcaagtgatactcctgcttcagcctcctgagtagtagggactacaggcatgtgccaccatgcctgactagtttttgtatttttagtagagacggggtttcaccatgttggccaggctggtctcaatctcctgacctctggtgatccacccacctcagcctcccaaagtgctgggattacaggcttgagccaccatacccagcctctttctaatctttctaccttgaaaaatcaacaaagaagtctttcgtcagctttagataattaaagccaagcaagcaacaaatgttggtctttttcagtagaaaccatgttaaaaatagttacacaagcatcaagcatctctacccccatcacacaccttgtccttgagaactggttttgctgtgtttcagttctgtccagttctccctggtgaccctttcctcccttgattagttccacagcactgcaggctaaggrgaaaaaggaatgtgtgggcccaggaggggactgtcctaggagacaggccgatactttttacttttagataagaaatgaaaaagtgttcatgacttttccctctgcagactctcccttcaggttcaaacttggaactttctagctttggtcatgtattttatgcccttaaagggtttgtacttttctccatacatatccagatgaccctaagtccagaaatagccagctgctgcatcttaactacaagttaattttatcatattagaggaagatatcaggaaggtttttgttttgttttgttttgttttgttttgttttgttttgttttttagtaataggtaaaaaattaaagagtatagaaggaaatagtggttccacagaacaatggttctggtttggaatctccaatgtgaagacccatggtcttccttaaacttggtagcttgtggggatttgtttttcccacatcccaaaatagcatctctgtgactgggctgaacgtgtacatcctttgtcgtggagtcaggctcacgtttaggacccctttgggcatctggctggtgactatcactccctctgtggtcttccccattgcctgcttgggtcccaccattattccaaagcatacaagtgaactactgtctcagaaactgatattatatttgacatacactgggattgcaaccagtttctttgcactgacaggataagagagcaggcggaaatttcyatcaagagggatgaaagaaaggatatgctcagatttccagcacttaaacacaaggatggaagctgatatcatccaaccacctggggttcatgaagggaagtgtaaggtctggcattccaatcagcttgatacagcatcaatcatcccctgggtttcagcagcaattgtagaacctgatttatcaataatggcatcaatctcttcaatcacatcaaaataggcctcattgttggtgtatttcaccccagtacctcgccaaggyaccattgacagttatccagtgggaagttrgtcacccacattggtgcttcctgtgatggtgttgacaactgttcgaaggatagtgggaggctttatcttttctttgaggatatttgactcggtagccaacgagtcarcttggaaacccattgccaagcgtctcttctgatgccgcataaatyacaatcacattgtccttcatcactaattctgaacagactccaacatagtcctgaaatgtgtccactactcagtgaagaaactctgacaaatagaggggagacctccatctggatcacagccacaaaaaaagatcttgtggtggtaaacacttaagagacagtggtgaggggtagggataactggaggcacactttctgcctcagtagcttgttcttgcacctcaaaaaagtattcacaaacagaacagtgtaccacacttctccagtgtttctccaggaaaatatctccagaggagttgatcaagaaaagtctataaatcatgatagactgtgattgtcaggtgagaaaggaaagcctttttcagtctgaaagcctcaggactctgcagattttcaaccccatctttcaagaccaggctcagtcttcctctactgcacgagcctgaagtatccctcccttgaatacccggcctcactcctcggagcacctgatgcttgctccaccttatgaacaggtcccaccctgctctgctttacatattttttaactgactttatatttgaaatttgaaattaccaatcccacaaattttggatttttttgttttctttaaatatatacatatatataaacagagctatgtttaatttatacagtatctttggttgttcctagattgtcattcctagggaaacaaagacaaccagtttgacccttccctcccctcctttcccctaaaaaactctaagttaaaactgtggcatttttttaaaggaaaaatgtaacaccaagattcaaagaaggatcatgcttacctcttctttccctgtgagaggctctccccagaggtagagatttaaattcagaggaattgagcaatccttgagaaactttactttttaaaaacttttcttcatagaaaaatcaattcactggtgagtaagaggatccgaaaaaggaaaacctccctttgaaaacattccagaattggtgattagacttccagtttcatactatcatgtccctacattagacattttggaacaaaccatcaaaaaccacagttggttccaaagggttagtcttatttttagaagttcagtaaatatttagaaatcacttcaacactgacttttagttctatatgtagcttgtttgtgaaaataattttataacagaataaggttaagcagataatgtcaaataattgggtcttgtgtatgtacacccaaacgcacatgagcgcgcacacacacacayatacacacacgcacccactcactcacccttgtggacctttttctgcgttcctggagccatatttagctttcctgccactttagattttcttctatttttcccttcattttcttaaacagaaacttgggctttgtaaatgatactgaactatgcatatacctatgtaggtactatatagatagaaagtgtgctgtgctttgattttgcatcagcggttcagatttcaagtgctgccctaagagagaagtaagtatttggtacttgtacctaggacctctttgtgcctgatttctgtttctcctttttgaatttctagaataaatactcggggagatgtaaaaaatactcatttacaaattttaaggcaacatgactgaaagtagagaacagagaacctattgcttttgtttacccgcagaagttcggttctgtatcaatgccaggtataattctggtttttttccagttgcctacagtggtcccccaaaccaaactaacctcttaaggcttggctagcaaggcgtgttgtgaaagaatacaattgagaaagatattttgtgccccagcagagtaaaatggttgtttgaggtaatcgctcctgggattcggcaatccatctcccttgctttaaggacaaagaaaggttttaatgtcgagatgccaagaggattatcagaacttgggagtgacaagtagctgttgagtattggtatcttttgggaaggaaaatatgagatatttgggagggagtgggagtgaggggatgatggatggattgggtatttcttttggcactgtaaatgttctcttggactattattgtgaactccctgttgagtaaagaatggcattgaggatggttttcttcattgtttgtttcacttcatttaggttttggatttgaatcaggatgtgtttaagaatttctttgagtctctttcccttgatgctctcttcttttgagtcctcttggggaaaaaaggtaaataatataattataattgtcaggttactttgagtcaagaattaaaattcctgatgctctttaccaatttatattgcatttctaactctgaatttaaatttcataccttttctatatagtctttctcaaggccccgtttaccatactacttgctttcagttatttctaaaatacaaacttgagaatgcaactgtaatggctaccacagaagttcaagtttaaatcaaactatgcagtatgagtaaaagacctctccacttcaacatatcccctggattccagtactctagctaactgagctgcctgcagttcagtgttttctgtataygcttactggctgtgctttcagacaagctgtgtcctctgcttaaaatggcatcttcttcctccttcctccacaacccctgccaactgtttttccttaactaactccttaaaaatttagttcaaggggcacatctttcctgatggcccctgcctctacaaccacggtcagttaggtgctttcttctgtgatcctgttgttcccagggcttccctctataaaggcaattaatagtctgaattgtatttgtatggtttcttttctctttgccccatgcaaaaatagggactaagccttttatttatgtccctaatacagggacataatgcagagcacattatagttacgcaaatttatgttgagtagatgaattaatagatggataaatggatgaacaaatggtacacagtttctgttttgttttgttttattgagttcatgatatttgcggtgagattttattccatttacaacacagtgccatttagaaattcattcaacaagcatttattcagcatttactgtggcacatgtgtttttttkttgtttgtttgtttgtttgtttgtttgtttttgagacagagtctcgctctgtcgcccaggttggagtgcagtggcgcgatctcggttcactgcaagctccgccttccaggttcagccattctcctgcttcagcctcccgagtaggtgggactacaggcacccgccaccatgcctggctaattgttttgtatttttagtagagacagggtttcgctscattagccaggatggtctcgatctcctgacctcgtgatccgcccgcctcggcctcccaaagtgctgggattacaggcgtgagccactgcgcctggcccacatgttttttaagaaaaaggaatgtagtaagattcttagtggaacaagttcagtcacatggctgagccctttatagtttgctgagactagaaattcattcattaagcgatgttgattaaagcactgattatgtgcctcacactgggctagtctcttaggatactttggtgtacaaaacaaagactcctgccctgtagaacccacattttgcatacattctaacagggtagaaggaggggcagtaacaaacataaaaaataagtaaattactatgtaaatttacacatataaagtgtgtatgtgtgtatgtgtatacacatatagtgtatgtgtatacacatatagtgtaaggaacaggagctcagcatggctgaagcagagttgttgaagggaaaaatagttagaggggggttagagaggtgggcaatagtgaggattattgcaaacataggtggcatagtatcttgtatgaaggacactggctttatgagtgagatgagagccatcacagagctttgagcacaggagtgacatgatctgtcttagattttaataggaacactcctgctgtgttgagaatagactctgagggcgtggtagaggcagggggaccaattaggaggctatccagcaatccaggtaagagatgatgatagcttggatgagggtggtagcggtggaggtggaagaagtggctaaattataggtatattttgaagatagaaccaacagattttgctggtagatttaaggtgggcataagagagaagttaagcataactgaaaggtttgaggcctaaacaacgggaaggattggagttgccatcagctgaaatatggaaatctatgggtggagtaggatattttttggtggggggaggggctatggctgtggaggtgagtggcattagctgctgagttttgcatacgttaagcaatctttattagacattcaagtggaggcatcaagtaagcagttagatacctgagtcaagttcaggaaagagggctggactgaaatacacaattgtgagtcatctgcctgtggatagtgaagtcaggagagtagatgggatcactaaggggaaagtgtcattaaagaaaagactaagaactgaaccttgaagcattctataacattgaaagatcaggaaaaggaaaccaagctagagcaatcagagaggtaggaaaaccaagagagcacggcgctttagaaaccatgtgaagaagacatgagagaagatggagtgatggtgtgtcagttgcagctgatctgacaagtgagatgaagtctaatcactgagtgctgcatttagtgacatagaggttacaagtcacctgtgtgagagtcattgcggtggagtggtgcagttggagcctgacttgagtggagttaagatagaatacagtgagcacaattggagacagccagatagctgaagaaggatgtgggttcttctagattcttgaggtgaaaaaggaactgaagcgaaaggtcatcttcctccccttttattggtaaattggtattaagtgtttcacaagaaatactcctttacacgtatgtgattatagcttgggggaacaatcaaggataaatgacagtttcttttctttctttctttctttctttcttttctttctttggcattattgtgagagggaacaattttataagtaaatgtttttactccaaacatgagtaaactgttcaagctaagggctttactgacttacttccttcatgggtttgtctggttcatcttattcccttgtcatctatttctcctgatgacttttttccacttataaattgaaatatagttccacacccatgacacaattatttctgtaactttggcccagtttcctaacccagagacatttttctcttcagtgagtgctgtaaattaaaaaaaaaaaaaaaaatagttcattgtcttcttagattttattcaggagcagatttttccctattcctttgcaaaattgttgctgaatagtgggagaggagaggaccagtaatgataggaaacaaacaatattttcctcactttgaattgctaagatttccttctaatcatagaatattgtcaggttccttcttgtgggttgggaagtctgtctggatcctttacaaaagaggactgagggacatccaagccatatttgtaaccagcagggaaaaatgccttctcctggaactgcttatctctcctgataatgcatttctgtctttcaagacgtcagttaagtgccgtgcactccatggaatgtcctctgatccttccggctctaggtagtattggttttcctctgaatcagtgtactaccttctgcctgtactccttactttgtgtgtgtgtgagagagagagagagagcgtgtgtgtgtgtgtgttttaatggttaaaacatctgtgtctctacaggctggtagaactacattccacacctaaccttgtgacttccaagctttctgattttaggcaaattgcttaatctttgtgtgtcttagtcttttcatctgttaaatgggagtggttcttatcacaaaaagtagtaaggattagaaaggaattctctataaaattgtaaagttatttattcagaaaactggtaacttgaataaatggaaacccgaagaatatatgtaatatatggaataatcccctatctttagggcaaatttcctgaaggaaagggacaatagtttatctgtctttcctaataccagttgactgagaaagaacttagtgaatgtttattaatggtgatagataacgcttggaaaatatgtggaatggttgctcacagaaatctgtgatatgtgtcttaaaatatttgcacattagcaaatgttttagactttaggaaatcttccagactaaaactctttctagggaaatggtgttgcaattttgatggtatataggaagtcagtgrgctttccttttagttttcctaacattcatgaaaatttctgggtttctcctatttcattcatattttcatagagaattcagaaatctgctttaattttaacacagtcaatcaaccttgttctataattaggatgagaagttaaatgacatttacttttgagcaaactttcataagatatgtattttaatcatgtgaaaaaaagattagaataacaaaatatactgaaacaggcaaattacaccttctaatgagagaagcgatscaggttcattttagaaattgtagaaagttctgataagcaaaagtagtacacttcactgagatgccattgtttgcacttcatgtatattgttccaggctttttctatgtctaaatatgtatatgtgatttcatacgrtgatagcatcctgctgtatattcagctccataaacagcttttattccccatgtaatatacagtgaatgttttaaatatgcttctgcatttttttgatagttgcatttttttgatagttgcatgttatttttttctgtggatgtaccacagttaatccactgttactctttagtttgttttcaattttttcctcaattacaaacaatgttctgatgtacatctgaacaaacttttaaaatttaaagaccacaaacatttcttagacttgccaatataaaatacctaattcaactttgttcattcttaaaacattcctttctgaaccggttttgttatttatttgatggtcatgtttggagctcctgtgtgtgactgaaaaaagaagaaaagtgtagttttctgaacataatctgcatttcagattttttcatgaatctaagacagcattttcctcatttgatccaaactagagagttttgataatgtcatcaggaaatgatgctccgaggttgtcttctcctcaaccagagcaacccgtaattcatggctagtgaggttgccaggaagtcagtgatccttaccattgtgtcatttgaatgaaagaaaggctggagcataggaagtggggagatgagaaagaagccagagttagatatctatcccacagatttaaggtcaccaccgtttccgtctttcatagctatggcaacttgagatcccatgttttctaggttagttatcaaatattccctccagttgcccagtgaaacatcttagaaattctagtatttggacatcaaaactagcatatttctattttatgcacctaaaaatgacaccaaaaccctttatgacatcatggttgtcagttttagggttataaaatatggtgaccatatatagatcttaggaaaaggagtaaaagagatgagttaattattcattttttcaataaatgtggtgaatgaatacttactatgtacctggcactgtcctagggcctgggcttacaaagacgagtggacaagtccttaagttgctcttggcgtggtacacacatatatgtttaatgtctacgatgctttgttgttatttgttgctgtgtaaaagacatatgtccaagatgctacaggaacccagaggaaggaaatgcaaaggtttttacagaggaagcaactctttagcaggttaataagtggataggcattccccagggagacaaggggtacatgatgagtgtcattcaatatgtgcaaagaacagagtatattctaggattctccagcaaacaagaattgcaatgttgatttaaaacatttggagtaagtattgggttgaattttttgttggtgatggtggtagtgtttgctaattgtttttatttttccatatttctcagttttttaaaatcttcattgtttattcctttttagggaattactaaaccatttgaccctgaaagatcagatgaaatggacatggcttattaaggagttgttgtaactacttcttgtctcaatgacatactattttcctgtcttggatttaattgcttagaaattatggctacagattcacaaagagattggaagaaagaatagataaagaatatatagttcaaattatctgctaaattttttgtgctgttagtaattaatactccaaaatgtgataaagatcactgtgccckttttgttttgttttgttttgttttgttttgttttagcattggaaaagccttgggctatacattctgagatttcaaacaaagtagatttatagtggaaaggaaccagaggtttagactaaatagatacgctgtaagagagccataatgatcttatttaaatattttccacattaaataaggcatgagtactgttatgctactgccttttttttaataattgaatttgcatccatggtggttttttttcattccccgtggagttccacttgatagccaatgtgaatatttgaagaaaataatctgttggagcccagatttgaattaaacttcctcaaagtataatgaaagttttgagtttgtcttataagaaagaaatttttgtttatgctttagaagcttaattgatagaagtctggagagcaataattggggtgaatttttaagatggttgtaagattgttcacttggtaaatatttcttgagctcttactgtagacactgtggaccagtcattgaactgaattaactttcactctagttcctaatagacatgttaagctgctggcttcatggagtttacattatagtgagaggaaacagacaaaaacaataaaaggtagttagtagttagtaaaatcattgccaattacaataaatgttaggaaggaaataaacaatgggctgagaacttgaaccacagagaagcacctgctttgggtagagtggccagggagaatcatcatgggcaagggggaggcatgtgcatgcacttggggaattgaaaggaggctggtgagcaagaggaagcatagcatcagataagcatggagagctaggcaggcaacagaccacacggggtcttatagggcaagatcagaagtctagattttattctaatgccataagaagacattaaagggttttacacaaggcctaacctgaactgatttcttttttaagaccattattgccttgtggagaatgggagcaggaagatcaagtaggaggatgttatattagtctaggcaagagatattggtgactgggctgaggtgtagcaattaggatggagaacaaaagatggttttgagaaatcagcaagatttgggagagggcatactaaggagaaagagagagaaatcaagaatgactgatttttgtaaatgaagtttactgacttgagtaaaaatgggaatgaagtgacattgaatgagatgggaaagtttgcaggggcagaaataaagaggtgtttgagttttgtttaggacctatctctaatatgtttttgaggattctaaagggagctgtcagttggctatataagttcaaagctagggaaatctggatgcagctaaaattatatttgagataagcacaccttccatcaatatgttggctgtaattttaaaaagcatttggagtatacttgaaaatactgaaactctctatctgtagtacataccttctgttcatcagtgactaattttagggtacacaacagttgtgcaaaagaatgaagtcctcttagttgcacttcttatcaaaatcccaatggtattgttttatagaaatagaaaaaaattaaattcatatggaaccacaaaggagcccaaatagccaaagcaatcttgagaaagaagagcaaagttgaaggcatcacacttcctaacttcaaaatatattacaagccacagtaaacaaaagagtatggcactctcataaaaatagacatataggccaataaaatagaatagaggccccagaaatgaacccatacatatacaatcaattgatcttcaacgggagtgctaagaatacacaatagggaaagatagtaccttcaacaaagggtgttgggaaaactggatatccatatgtgaaagaatgaaactggacttttatatcagacgcaaaaccaactcaagatggatgaatgacttaaaaataatacctgaaactgtgaaactcctaggagaaaagctaggggaaaggcttcatgacattggttttggcagcaatttcctggatatgacaccaaaatcacaggcaacaagagcaaaagtggacagataggactaggacaatatcaaactcaagagcaaaggaaatgatcaacagaatgaaaaggcaactcatggaatgagagaaaatattaacaaactatacatctgaaaaggggttaatattcaaaatatatagggaacccctacaacccaatagcaaaagaaaaaataaggagcctgattgaaaaataggcaaaggacttaaatagatatttttccaaagaaaacatacatgagcctggccttcccatatcaggttccttagagaaactgaaaatagtgatggtgaaggggctggtggagatacctgtgggcagcaggtgcccagtttgggccagtgagtgaggagaagcctcacacacagcatgtggtatgtggctaccattttttctcttgcttaggccctgcaaatgttgggggtagaccttgcctttcgaatgcaatagtccttgaggtttgtaccatgcttttcatccagcatctagacagggcctgcacatgcacaggtgtttgttaaatggatgagtaatccagttttccttgttttctgtggcatggggaagaaacatgggttgcttgaagtaccttgggttcaacagacctcaccatttccttcttactgatgtaagaaggccttgaagacccatcccagtcagtcatccatggatagcatctatgtcaagaggatgtcgggcctttatgtgtgattctatagttagtgcagtgcacaatggggctccactgaagggtagatggaggctgatttccaacctgttctcagctgccacgctctgtatctgctgttgaaaaggggcctttttctttgcagggttaagtctgcccagaggtggtatctttttctcatttttctgcaagggcataggcatttgctaaatcagaaaggttgcctttttgtcattcaaacaaaggtgtcctaggcttcccaaggtcatatttgggtacccttgctccaaattctccatgactgttaagttcttgaggaacttgagctgtaagcactccaagtgttggaatactttgagcagttgtctccctgtgcttgcatctcttctccccctcatatagaaatcccagataggaaaagtgtcgatccaagttgcaggcttccatgtccattcctagggctctcaggcctcgctgagtcagcacctgctactaccacacaggtggattggtccatagatattttaacccattgctctgttcccagatgcccctgccttccttctgataaggcaaatttaatttgtgtgtgtgaggaggggatggagagggtgctttgcttgagccaggatatagtcctttatattctgctgaaaattctcaaaggagggctatccaagggaaaataacaagcccgggcatgagagaacttagaattccagggatacttagcggtattaacactaggaaaagggcacattttttttttcatattggattgctaataatcacaacaatgctaaatacttcctggatttctttcagttgggctgaatttaagaagtataggtttatgctgttccttgatgctgagaaaagagggtacatgtaatactgagacatccgcacagtggtgggtgttgaggcaccctgccaggtgggagagatttgaaatatattccaagactaaagatttgggatttttttcgtactttcaaaaccacagggattgacagagtttaataataagattacagagttactcctgtgaatataatataccacttgaaagaagtacatttggtcaggctggacggaatctcatcaaagagataagggaaagtccggaagacacacctgagtatggtytgaagccaaagaacagcatgctccaaaacaagcccaatctcaggttaagaagccttcatcatttagagtggccaccacacggactctccttgttttgtcttttgactgttaggttgagttctgatggaatgaatgatgggggtttgccccagcatattagcagcgcatttcggcccttgtgccagtctggaaacaggcgatagagagtgaagtcagtgtgttaccatcacagaaaacagcttagaaaaagataccccaccagataaataatgggcatctctggatgagaagattgatggctccttttattttctttgtgattttctgtctctttctcatatttctaaaatagatatgagttgcatttataatgatttttaaagttattccaaaagagaaactattcaaagaaactgaaactttatggaatgaacctggaatagcaagaaaagatatcttatggaagtattcgaaatactaaattgatagccatccttagtttttcatgtcagtttgatgcttgaacattccttgattatccagtgctaaaaggaggaagaaaacatttatgaagcatctacttaatgtgtaaggacttaaaaaatgagacatcctttctgaactcaaggtagcttatctaagaacaacagaaatacgcatatatgcattaaactttccatttttgtgtctattcatgtgccaggcactgtgatggatagaaaatggatggatggatggatggatggatggatagacagaggttattgccctcaaggggccaatagtgtactagaaagagaagaaatttaaactgaggattacaatatagtcagtaagtgtcacaatagagttagtcccagagcacgtgagtacagagaagaaacgctgccctttgcctcaggaggggtaggagaggattcatacgaggaagtcatgcctgagctgcatcttggaggacaaagagcactcagcctgagagtgaaggggatgtgccaggcattgaagtgtgtgcaaaggtaagatgcaaagagaaccaygcattctgagagctgacagtcatcccatgtggctgcagttgtgttggggtgagctgggaggagatatgagagtcgtgagaggtcatacgctgtgccaaaacctctgaggtttgccctgaagcagtgggaagcccttgcaggattttaaagaaggagagtggttagacagatttgcatatagaaaagtccctttagcaatgttgttcaccaacaaggcagactaattaggaggctagggcagcaatctgtgttagaartgatgagatctcaattaagtttgtataagggaaaatgcagagaaagactcagagtcaaggaacatcaaggagattgattggaaagagcttaattgataggttgtggggaggatgtattgaggaggaattgggatggccccttgatttcaggcttggacaactgggtgctaatggtggcattctttgagctggatgggatacgataaactgcaattgaagcattttaaatttatagtgcctgcgagatactatagaaaccctaaaagcagctgggaatataaatcttgagctcaagaaagtytgggctcaaagagttatttgggagtcatcacaagtaggttgcagttaaacccattggtgatggaagagattattcagaagcagtgagaagaaaagaattcggaagaccatgaggaacaggaacatttaagaaacagtcaaaaaaggtggaagcctgccagagagcccaagaaaaagtgttcagagaagtggaggaaagccaggcataccaggaagggaaaaccaggcatatatggaggccctgctcatgctgtctcccaagttcatcatccgtggaagaaagggcaaagagcaaatgccaagtggcagacatgcacttcccaactgagtttgcctctaacaagtctctctggatgtaaatgtctgtcgatacctcactgctagaatgtctaggaatacaagtttcttgtttgtttaactgggaacattaccttcctaaataaagctatgatcctgttaataaagcacatggggaaaagggatttggggtatttggggtaggcaaatgacagtgttggccacttcaggtagccaagggaagagggacagtcagtgaaggaggactggtcattcatcagttcaacacagatttgagagcctgctgtgtgcaaggtattcagtgtccgtgcttcagagaagttgaggaaggtcatgaatgaaatgactgcttgggtgaagcaatgaggaatccacctttgaacttggggtggttgtccaggaggccggattgctgtgcctccatgagcgtgtggaggggtgggggtgaagatggagaatggacaacagtcttttgaggagttgactttgagcataaagggagtgggatgatgccgcagccaggagggagcatcaaggtgaagaagaggtttcaggagccaggaggaagggtctcaggaaggagttcacatgctcatattctcagggtgaagagccagatgagggaaagtagtcgattcaggaaaaagagtatctgataaagctccagacaggtatgtgttgtggggagcggagaacataccttagctgtgcatcagagagggacaaagatgggtatgggcgttcatagtttacaggtgggaaggcaggaaacaaagggcccaccattcctcggggaggcagggggcaggtagcggacttaaggaaataagcgaagtcttcaaataggcagtattagcagagaggttaagagccactttggaactggacagtctgtgcattcccatcctggctccaactgtatgaccttgggcaagttatttatatattttattcttctagttttcaattttttttttttttttttgagagacagggtctcactctgtcattcaggatggagcgcagtggcatgatcatagctcactgcagctttgaactcctgagttcaagtgatcctccagccttgacctcccaaagcactggaactacaggtgtgcaccacttcacccagctagaggcaagttatttaacctctctgttgccttcgttttcctctgcaaccaagcaatgaggataataacagaaacctgttacttggagttgttggaagaattaaatgagttaattcatgtagtacttgtctgagtgcctggcacaaaggagtgtttcatatgcattggctgtgataatgattatttataggacagagagcacatgcagtccagggtcacctaaacgcctaactggtccagaatgcaagtgcgttgrctgagggctgtgagggcacagcagaygaagcattgcattcttcaaggaagtcctcagggggaggcatttgagattggcacagccctggagaggctagctcaagtagaacaaacactgttggtgcaggcaagaggctgtcagagcacctgccacatttgcagaggaaggagccctctgacacttgagagggagcatgtggggcgcagggggccctgtgtgtagaggctccttcacctcaagggtgggaagaatggtggaggagcggccagagatgagggtgagcatcacactttgcaaggcctcgaatacctggagtttcttctgtagccacgagaaggttgggagcagggcaatgagggtccactctgtcctgtggtgctccttctggtgagagtagctaaaaatagtcatcacaatgctgagtgcagggactgcgtatggtgtgccaggaacattggagtgctgtaaatcttggacattactaacgactgccctgtgagagaggtactgttatttgttttatttttcagatgaggaaactgaggcacacagaggttaagccacttgaggattccatacagctggtgtgcggcagagtcaatagtgaagctgggcagtgttgtgacaccagagcctcttcctgtgaccaccgagctgtcatcacctgtcacattagggtgtggctctccagagggggtagtgacaagtggagattggagcaatgacctctgctaggcttatggcagcttattgataaaacattttctgtcttagtcaaggagagtttggctgtaaggactagaaactcctgcaaagaactcaagtgaatgctgaatggattgtgaagatacaggggcgctcccagaacccagttgcttgctagggagtatggctagacattacacagctggagagttgtcaggctgtagcagtatctctgtctgtctggaaacacagggccttctctgtgcatctttccacagtctgattaaattgcagctttcctagtttcactctcccaggaccttggctagccctgaccctacctgacctgaaaagtcacttgactcactcagtccctgtgttgtagataaagttcttgctttggataatctgctggtttagcctagttcaagtgtccctccttggttccttctgcagctgggataaaggtggcacaggttatgaccaggcagggagaaagctgctctgagaactccatgatcttcagtggttagtgaagcttgcacgccttgccatcttgacttaactgctaaccctgcactcctcagtccctggctttgctcaggttctgacagtgtttttgttgtaaacatcttgtggggctccttcctttcagcctgcagctctgccctggtctttcaggtcttcatcctcatgactattgcagcaggctctagagtcacccttcaaatctggttttcgcttcccattttatctcgccttcttttaagcaatattatttttacaatttttattggcctcctattcagaagccttcagcagatgttccttaatttgtcacattcatggctgtctcccagggccatctagcccgccgctaatcatcctcttcccttgaattcccatcgtatcagcacaggataattttctcttaccagacatgccatggcccttcccttctccacgcctgctccttccctcctgctctgacatctctcatccatgacttaagaatgctgactgtagaccctgactctagaccacagtcacctccctctcctctgaactccttttagttttgattctctagggaaattgttggtttgttgaaagcagctgcctgcccagtgtgtcttgaacctgcacacagccaagcacatgtcaaacacttggaaaatttaatattcagtgattagtggctgatttattatctcttttggccttggtttttttttttttttgctttttaattttttattacatattaaagaacattccatataagctctctgactgtgatgattgaatacttgttagaggcaaagccaagtaaaagtattaactctaatcctgttaaagactttcccattattacatgtgcttgagttttggcttctcttttgtgtgccttgagaacagggaccatctcattcatcttgtatacctcaaagtacctcacataaagacatccgggaatacatgtttgagtaaatgaataccctcctcattgaagaatagatcttaagtggtcatttcatgactgcttctatctaggcatttacatttgtgcctagtttgaaaccactttcattgcttgttacgaattaagcttattcacccaaactacagaaaggcttttaaaaattttttcctttggacaaaatttgtctcctgctcagtccttttctgcccataacagcattggccatcccctgcaatgattgtatttatttaacagttcttcctgcttccctgctatggcctttcagacttccccacaggcacagagcccccagacacctggcagggtaactatcagctgttctttgtatttggggcatataggggatctgtgtggctttggtttctcaatagaaaatgacataaacgcagaaatactttgcaggctgctacaggaacaaaggcaaacagacttgtttgtttgtttctgagaccaaacatttttctgccaatcaaaactggttttatttgcatatagtgtataataaattgttgtaataattgaataattcccaaggcatgtactcttaggaaaaaaagaggaaaatagcttagaaataaaatgtggacaaaaagcataagctggtgaatgaaaaatgagaaatattgccatgtagtaaagatataatattgtgaagtctacccagtatcaaatgtatggtaaaaactagggaagaggctggcacagtggctcacacctgtaatcccagcactttgggaagccaaggcaggcagatcccttgaggtcaggagttcgagaccagcttggccaacatggcaaaaccctgtctgtaccaaaaatacaaaaattagcctggcgtggtggtgtgcatctgtaatattagctactcaggaggctgaggcgggagagtcacttgagcctgggaggcrgaggttgcagtgagcagcgatcatgccactgcactccagcctgggtgacagagcaagattctgtctcaaaaacaaaacaaaacaaaaggggaagaaaaaatgtaagcaagttatagaggcaagaagttcaactatgtgagattatttgtgattatcccagatgtgactgggaagagatagaaaagtaacagtgttagttaaatctccatggattctttgcctccatgccaaatatcatgactatctaactaattactccccccgactcccagcttccccaccaccccgacactatcaccagatacacacagatacatactatgtctttgtatatgtaaaatgaaaatcattgcaggacatcatgcagtagcagtgtttttcatgaaaggctgtgagttacattggtctgaaagcaacacatccgtcatggctgttttcactggcgactttcttctgtctaatgtttgcaatgaaggcttggcttgaaaaggcttatgaattcttttagcacaacctttgttgggaaaatgaattacaagtggttcatttgatgctgatccttttgtcattgccatttatagctattctgtttattcactttgggagagccattctgagaattgatgaatgtgttttatgagagaatataagagccctgcaatttgttttgattggtctccatttggattcatagcgagcaggtgccatcgtttggaattggttttggcagtggcttggttatataaatattagatacatgaagtgaaacctcatttaaattattttcatcagtaagaataggagagctttacattgaatgtaagacaccatagttctatttttacagcttctaagcatacaaatgtgtaacataccatatgtctgaacatatgtatgtagaagtggsctccattgtacaaatatttaacatacagattttctgcatttctttgagagtttatgcaaatattctttaaaaaactctaagcctatagtttcttaatataagaattttttctggtctgaaaaatacaggcatttctgctttggaaactatgttaaggattgtttcagtttggtgttttttttgttgtttaagcctcagaaaataacccagcacattttaaacctttgctttctcctgctttttgttgttgttgttgttactgttgtttttgttgccaaacccacattaaaaaaaataccacgcctctttgtaagggctctrgaagaactataatacttcctatcttcccagcaaaactgtttaccaggctgacgttttcctaagaatagctccctaggttttcatgaatccatataaatttccacacatttgttttttattctggcacaaaatttaagagggacttacgatcataggtggaaggagcaatgaggaagtctgttggtaaccctttaggtaacatcctaaacctcgggctacttgcgggcaaattgttaaaatgcaggactcatgatctctgagtacacccatgaaaatttaaatacccttcacggtgctgggtctttttgtaagcaagccaacacggtgcccagactcttttccaccctctagctctcaaccttatgtccccagcaaacggctctaagtccaatttcagtgttcttcataagtgaagctttccatgagccccacaggctgacttatgcagttcctcctccaaaaacccagagtaaaggacatgccacattgtaaattgtagccactgcaatgcctgtctctcctgctaataggattcctttgaagacgagtacctgtccttgtcattatggccccgggcctagcttactgcctgacatgttatgctccataaatgttcattgaatgaatgaaagagtgaatttatttggtgttaggtaataaaaatgaattcaaaagagcataaataaaacaaaaatgattgactttaacatgcaggtgtgaccaaggcccaaattatcttccaattgctttgtctttcgggaaatgcgctaggaaatgttaacatacacagcctgaatggcatgaaaatatttgaatatggctatcctattggaagcccaattcccatagggcaagttgcactcataatgaccaaataatcaatgagtcctctcctcattccaaagaggatttgaagtgaggccctacctaagaaacttggcagaggcaccaaaacaaaagcactatctaatggagttagcgcaattcataatcgaagagaagtggacagcagcagagatggacatgaaacccaggccttcggaggcctatcccagcgttcttccaattcattcttgttgcttcactttatcagtgtttaataaagtgtttgtttttatgggaagatgagtaaggactcgtggctagtgtcccttaacctcttgtgtctacagattggcctacttagttaagtgattaggtaattagcaattctcccacttatttggccatgtatgagaagcaaactcatctgtggcaaattaaaaatactgagttttatggccctagttggggaattagaggttgaaagggttgcttctgactcacatatggcccccaggcacaatatatctaaaactttcggtaactatagagttttaaaaagctcctctaccaccttttcaattaagacatgccctctgggttgaggcttactgatgtagaacaagttttataggaaaaaattatgtaaattaatataattggctaaccttttgattgcatttacaaattgaaaaatgcggtgcaatattgattagacaatcttctcattgtttttaagtaggagaaaacaagtaaaagagagaggtgtatggtggaaagagcattagttttgaagtcagacaaccctggatcaaatctcagccctaccacttgactggactccaggaaaatcatcccaagtcacaacctcgctcctctccttcctcctagacttaatgcaggggctgcagtagaccctgactacttggtagtgatctatttaagctcttaacggattcccagagctataacaatagaaacgtgtgtaccagttcctagcctacctcccaatccacatttccattgagaatcatgtttctcaggcttattcccctactgctttcccactttcattatactttctgttttgttttatggcccatcattgggtcgtttgtccttagagccattccttactcttcctgtgttctgtatcacagggaagtcatcccatataggatgcatttctcaggcttcctatgggctcagatgcttttcatgaggttggtctctgggagccatagacagggattggcgggtagaaggtagatgagaaaaaccaggatgttctcccccaacctgtgtgtcttaggtggcatctccaatagtgactgtcttctccatgcttctaaacatacccctcctactgcagttccaacttctgccagtcaacccccgtcctgatgttctgaccccagctgacctctgcttttgaggtctgttaacaccaccttctcttgtgcctgcagccctaaaagcaatagtggcatcatgttgattgtgatctgtttcatcaccatctcttgcttagcttttcagttcacccatcacttttataaccaattccatgtattaaatatcccctctttaatatacccaaagtggtttctgttttccctaatagaccctgaaagcaatcctgaagtgataaactctctttattgccttttctggtcacagtagcttagatgatcccaagcctgtgaagcgtgctgaaaatactgactccctaggtctaccacgcagaggtagtgattccctggtttcagtgtgtggccccagaagctgaattttcaaaaagcttccctggtggttgtaatgcccagcactgatttagagaatggcaaagccaggctgagatggaggtgcgtggggtgggaatggatggttgctaggttcattcaccaactaagggcgtcacttttacaaaccagcctcacagcaagagagcccagctcagcaaaattaaaatgactgcatcccatggactttataggacagttacaagtgtcaaaatagcacatgttaaattggggagtgccaacggattctttgaagaataaatgaaatcacatatgtggcagcatttcacacatcgtagttgctcaatacatgatcttcccttctctcaaattgagtgaaaacatagaactatagaaagctatgaaatagtataaattatttattccttaaggtcacagaatccagatactaaataccagaaataatagataagtaactacatagtcaaaaaaaagtcattgtctggcacatattattgctcactgagctggtgctaaacagtccaatcatatgacaccataggttagctctctttcatatcagaaataatttttgaaaataagttttaactaggactcttgtgtcagattacatagtaacatcttctaaggagacatgaaccttgtgagtatgtccttacttggccattggaatttctgcattccaggctcttgccagagactacaactttgagtactccactgtccaattcttatcaaaagactggttaggagaaataatattcatggaggactgcctgaaagatatgcagcctgttcattcctcattgagataacctaaattctatttgtggtttaagtcaggttatcacatagcttcctatttggatctccacgtatttacttcttgtcagtttctctttactggggaagatgaatgaaaaaaggcacatctatcattatggaattttgaacaatgttaaaagagaagaccctcagaggtttccagacagagaaaaccagcatgcttctagcgcagggagcatcagactaacatgaaactactcatctacaaagtgggaagtaagcagtaagcaatacagtatttacagagagatgggacaaaagacctgtgagccaagaatcctgcattggccaagagctctattcctacataagtgcaaaaggaagacatttctggacatggagttactcagactgggccatctacatgccacttctgagaattgaatcaggacataggtgtcaaggtaggaggagatgaagagccaaagagagagtgatgagcaatgaacgttgcaaaacttatggtcaagtctaaataaatgatcataatgtgactacgaagtccaaattgttcattaagatttcttaaagtggaagagacgtgttgactatgaggagatatttagtagcttagagtggagcaggcaatgaaagagtaaaaatattccaagtatctctacctatggacaagaaagagaaaagagatgtcatggattgggttctctggaagcaagcactggcacacagttttggttgcaagattcttagtaggaattaacacccgtgtattatgttccctagaaagatatgttgaagtcctaattttcagtacctgtgcatgtgaccttatttggaaatagggtctttgcaaatataatcaagttaagatgagttcatgagggtgagctctaacctagtataactggtgttcttataagaagaggaaaatgccacatgaagagggagacacatggagagaagcgctaaatggtgacagaggccagggctggagtaacacagtggcaagccaagggactccaagaaagatggctaccaccagaagctaaaaagtagcaaggaagaattcaatcgagtctcagagggagcatggccctgccagtactttattttggacttctagcctccagaactgtgggaaaataaatctctgtcatttgaagccacccagactgtcgtactttgtagcgacagccctaggaaactgataaaacctgtaaaaagatgagggaaggcgcacaaaatgaaagtcccacgcaagacacacaaagcctgggccaccttgatggggagctggaggaagagtgccaccgtgccactcagtcacaagaggtgactgccccaggaaggccatgacctaggctaaactggctccctgcagaggcatgcagtaaggcagtcttcccttcttacaggagatctgggtagctcatctccatgtctacacagcaagccgagtgaaaaaatgggcagcgaaaatagtgtatagtcattttgctttcttaattgaaaaacaggtttttaaatgatttaaaatcaaaaagataatatgagcaaaccagcaaagaaataatgagtaaaaataagtatagtaacaacaaatgtaattaatagtaaacaaaacattgttataggcattgcctttatttcctgaccaacatagttctggaatgtataaggcaaaaaaatgaagtagacatacaggagaacatggcaaaactataattatattagggaattttgatataattatttcataatttggccgggcacggtggccatgcctgtaatcccagcactttgggagactgaggcaggtggatcacttgagctcaggagtttgagacaagcctgggcaacatagtgtgagaccccatctctacaaaaaaatttaaaaaattagccaggtgtggtggcgtgcacyggtaatcccagctactcaggaggctgaggtgggaggatcgcttgagcccaggtggtggaggttgcagtgagccgagatcatgccacttcactccagcctgagcaacagagccagaccctgtctcaaaaaaattaataataataattatttcataatttgacaaagtagacaaataatgatacaggttcgtatttgtatatagtgtttataccctaaaaacacagaatctgcatttttctcttttgtctatagaaggtttacaaaaatctatttctatggccacaggaaaaaactaaatgaatttgcggagaaaagctattttactcatccccttttttatcccactgtgataaaacaaaaaattgacagtgaaatgataataataagtaaaatgtaaatgcttgaaattaagaagccttcttatagatgattcctggatcaaattgaaaatcaaatacaaaatgacaaattctctggaagttaattaaaaagaacatttcacatcaaaacttatgaagaaattgttaatgcatttaggaatactttrtagcctaaatgcttttggtactattaaaaaaaaaaaagagtgaaaaataagctaaatattgcatctaagaaatttttttaagaatcagaagaaagaaggtattattaatgacgaaagctaaaattaatgtaattggcctcaaaacaattaaaaggagagaatctgactaatgaaaatatgtatataatataaagaatgtacaaatacacatgcaacattaggaatgaggaaaaaaaattgcccagatcccggaaggattaaaataagtcaataagacaatgttatgttcaggtttatggcaataaaatttgaaatctagaggaaattgatgtttttctaataaactataaattaccaaaatttgattcaaagaaaggttataaatcccgagaggagttataaacagaaaaaaacgtgagtgcgtataaagaaagccttccaattttatgaaaagtataaattctttcataccaaaaactgataaagatggccacaacggttgttcaatatcacttatgaaaatatgcttttaagaagattaagaaatcaaatcaaagatttattctagaaacataaggatttttaattttatatttttatatttctagaaatataaggatttatatttcactttatttaaaagagtgacaaatgaaaatatccaggagtgaatttagtaagacataagacaaattttaaaaaaagattgtagtgaaagacaaactaacatttgaagaagtagagagctatactatcttttcaaatgagaaaacttatgatcctaaagataaaaattgttctaaaataactatatataatcccagccagaatcccaacttggaagataaaagtgttgtcagctcagtcaacacgatttttttgtttgtttgttttttgttttttcgagacagagtttcattcttgtcgtccaggctggagtgcaatggcccgatctcggctcactacatcctctgcctcccaggttcaagcaattctcctgcctcagcctcccgagttgctgggattacaggcacctgccaccccacccagctagtttttgtatttttggtagagacagggtttcaccataatggccaggctggtctcgaactcctgacctcaggtgatccgcccacctccggctcccaaagtgctggaattacaagcgtgagccactgcacccagcccaatcaacatgtttttaaaggccacataaaaatataaatgcaagaaaatttccaaacttgaaggaaaaacagtcagcatggggaagtcgtgccagcaggcatcaaagcatactatcatgttactgcattttaagcaatatggcattagcttaggaatccacaagtcaatgtttggaacagagtagatgccataactaaatcaatgtatataggaaaacttaatgtatgctaaaggtggcttgtctttctggtaaggaaaatatcattaagtaaatgatttgggggcaattaggtgtccatctggggcaatattccatttggattagattccatttgaagtaagagctaatattaaagatggacccataaagctatcaagagaaaatatgggagaatacatgtataacatcaggttagggggagctctctttcataatccatcttccaaaaaggaaaaattgcaagatagtaaatttataatccataaaggaaaaattggcagatttgactgtgtaaaaatttaaaatgtctatgacaagacacaataaataaaggcaaaagaagaataatacttgcaacctctaggacagagctaatgtttaaaatactaagaggtctcacaaattgtttataaaagaaagataaaacagcccagtataaaaatagtcaaagggcatgaactggaattgtaaatcaccaataaacctgtgaaaagaatcagccccgttagtagtgagagaaggcgaattaaaaccagagatgcctatcaggtgagcaaacacttttaaagatggcgaacaccagtgctgatcagtgtgtcaataagcagrcactcaccatgcacatttgggctgattgcttcaacctttgcaccggaaagaaatgtagcaatagtcattcaaatagttaacatgcttattatgtttggccccacagttattccacttctaggattctttcccacaaaaataaaagtactagaacattaaagatgtttgaataagactgtttattcctgctctggttaaggtagccaaatttggaaacagtctgcatgttcatccacagaagagtgattggttaaacaatggtatgtccatcttgtgaatatatgcagttatttttaaatgagrtagatatatagatttttaaaatattttgataagagcaagtggcagaaataaatgtgtgtgtgaaaaagcatagggaagattttgaaaggctataaaacaaacagactgtttatattggctatcgcacggtgggggagataagacctcattctttttttttttttttttttttttttaagagacagagtctcactacgttgcccaggctggtctcaaattcctggcctcaagcaacccttctaccttagcctcccaaagtgctacgattacaggcgtgagccaccatgcctagcctaattcctttttactttatacctctctacatttttaaattgattacaataagcaagtatctcttctgtataaaacataattatagcacaacagcttttttgaacttttctttgaagttgtgtcatctaatcaacccttatggaaatcacaggtagtttatcatagggataatattgaaaaattgtccacatgtcacatggtgtcacctctgtgaagatccataggagaaatttccactccagcttgaatctccagatacctgtggttcatttgagcaactgctttgcttttatcttttgcgcattgtgcatctggtaactgatcgtattttcctttcctctggaaaccaggaatctcagagtcaagttgtagactgtaaagtttattcaacaaccataccagactctgtggcttatgttctatgcacagcccttgctgatrgaatcatcttgctctccatgtttattttccctcacccacattccttcctttgttttaattttaactgcttatgttgcatgtatccctatagctacctctgatcttttttgggagatgtagtagggatatgaataaatgatgaccagaaatttctattttaacagaaacctggcaaagaaaacggtctcgacaatgagtaggccacccatcactactaactacagatgacttgccatttcatttacaaaggtaaggaaataaagtctgtatttttaattaattctgatcaaatcagtatagagcccttacctttttattgtaaatatttttacaaatattctaaaacatatatctagctcataacctttaactctgacatcaaatttgaataaaacatcaagcaaacagaaacaagaaattttatgaattttggcatgccagaagggttaaaaaaaaaaccgagatgtggtctctgttgttaattactatgtgtgttaaatttttaaatagtattttccttatttttaagtgtagcagtgttcactgtagaatacttggagaatctaacaaaatataaaaatgaaaacctaaagcatttataatcccatcatctgtagataatcaccagaacttctgagaatgtctttcctccttccttttatgtgtacatggaaaatacacatgattataacttcaaaaaaaatttttagagacgatgtctcgctktgtctttcaggtgaaattcatataacataaaattagccatttaaaaatgaacaattcagtgttcatttttagtacagtttagtacatttacaatgttatgcaaccactacctctatgcagttccaaaacatctgcatcaccccaaaaggaaactcagtgcagtcagcccttggtatctgcgggagattgattcyaggacctgtggataccaaaatatactcaagtcccttatctaaaatgacacagtatttgcttttgtttctctttttgagacaggctcttcctttattgcccaggctggagtgcagtggtgcgatcatggctcactgcagcctcaaactcctggsctcaagcaatcctcccacctcagcctcctgtgtagctggraaaataggtgcaagacattgaacctggctaattttttattttttatagagatgagktctcactgtttttcccaggctggtctcatactactggcctaaagcaatcatcccatcctggcgtcccaaagtgctgtgattacrggtgtgagccacaatgcccaacgtaattatataatgttttttaaaacaatgttttgaattcatacttaccttgacttcattagttacagatgatgtggtgcagaagcatagcaagtctaagaagaaacagtagtcatcattgtgaccattgtaatggccctttgcagtttaccagtacatccccaagcatcttatttgtccctgctacatggcctctccgactccaatgcccctggttaatcggtttatgtgacctttgttaaacatcactctacaggaaaaataaatgaataactcttgaatccagatgatagttcatggccttcgtttatcattattttatgttttgtgctgcttaaaaggaagtgttttaaaaaaaaatagaagtttacctgtttttctcctcctcttccctactgtcaagtcagggatgattcacaaagtaataaaaagtactttaagaccatctcatcctccgtccttcattcatgccagttagttaacctctcattaaggttgtttttttaagcacccttcagagttgctcttgtagttttttggttttaaaagctgcaaagtcttaaaagtgaaattactggaatggcattctttagggaggtcttcattctgttggctctgttaaacagttgaaggcctgtattttaccctgagcctgatacataaaccattttaattcttctggcatttttattcaaaactgacctaatatgattataaagagactagaaaaatgaattattctttaagtcaatttaagctgatacagcatggaaaacaatagtttgtgaaacatctgtcctggaagactctattctaacacggacagattaaatagatgcaaatagaattgcaaaattatgtaagagggtggtttgattggtgggcagtactagatctagtgaggttggctcaccgtgattcttgcgtttattttcctggatggtttttagtcatatcaagctcatggcagtgtgggtaaactcagtcacttagttccaaggcacagaaatggttgatgaatccctaggtttagcatatgccgtgtttattaaaagcccagaatttaaagcatgcttcaaaagcgtaaaagaaagtcagaaattttacccttccttggtgtattaaatgttctgcatgcagtttaaggtaagacccttaaattatggttccctaattatgaagttatccttgtttaccacagaagtarcataactggctttaaaaattcagatgaattataggtcacatgtgaaaatcttatcattaggaagagagagaaacacatttgaagatcagatctcccaatgaaaaaacatattttatcttaaggcattagaattcacaaagatacgcaatagttttgagtgtgtaaaaatgtaaacttctctatatcataattatgaaacaagttaaaaggacacggtaagctgggcacagtgcctcatgcctataatcccagcactttgggaggccaaggcaggaggattgcttgagcttaggagttcgagaccagcctgggcagcatggcaaaaccctgtctctaacaaaataattacaaaaaattagtcccagctacttgggaggctgaggtgggaggattgtctgagcctgggaggtcgaggctgcagtgagctgtgatggcaccactgtactccagcctgagtgataaagtgagaccctgtctcaaaaacaaacaaaaaggcagatactaacacagaagaatattaataatgcacttggcaagcaattaatgaccttaaaacataaaaataagcaaaccactagtatgaataaccataataggtaaaaatcaatatcagaaacattaagacctccatagataaatggacgaaacaatggaagactcgaagaaatacaaagaactaaaactgatgtgaaaacaatgttaaccttcaccagtaattttcacagatgcaaattaaaaccaggagatgatttcttttacctgtcagattagcaaagctgtttaagatgataacagtcattactaaatgtgtaatgaaacaagcccccactcactgctgatagcagtgtgaatgagtatactcttctggaaataaatttaccaatatgtagtaaaagctttaaattttttaataccctagtatgccctagcagttccaagaattgagtccaagaaaacattgaagttagataaagatataagcataaaataattattgtactatttgcaggagcaaaactctttgagctgcctcaactatccttcaatattagcattgactaaagtattaacacacagtggtgtccacacagtggtatatcttgcaactagaaaaaaattattcttacaaagatatttttgtaatcaaatgggaaaatgtttattacataaatgttcagtgaaaaatactgggtaagatagtattgtaagttttttcatatgaaaatacacataataaaaggtagaaataaatatgacaaaatgtgaatagaggagttgcccaagggtagtagaattgagtaatttttttgttctgactcatattttttggtacttcccagataattttacagtgagcatgcataaccagaagaaaagttttttaaaaggctatgtagcctgggcacggtggcamatgcctataatctcagttactcgagaggctgagatgggaggactgcttgaactgaagagtttgaggctgcagtgagccatgatcacaccactgcattccaattccagcctgggtgatagagtgaaaccccatctctaaaaaaaaaaagctttgtagaaagaaacttatacacatgtacatgctttcttagagcatatgggataaaatatattacgaaaatgttttagatttatttttgaaagattaaggaatgcagatttcttttttagtattctgaaatgtttctgtcttccttaggaacaacagcaatagcaataacaaaaacatacttaactaaaatagatcctttggttagcaatattattaatatattgtatttcagagtaacattgaagttcaaagggcagtgtgtttctcttgtagatgtcttctgctgctgaaaatggagaggcagcacctggaaaacaaaatgaagaaaaaacctataaaaaggtgagtgtgcattttattttctaaagaggaacaccgttttgctgtttggcacgtgaatattatcaaaggcctttccttctcccaagcagttgtaagttactatcttagtttccagttgctgctataactaattactgcaaatttagtggcttagacaacatacatgcattatcttatagttcagtgagtcagaagcctgacatgggtctccctgggctgagatccatgtgtttgcagagctgtattccttcctggacactccaggggagagtccacttccttgtcttttccggcttctagaggctccctgcgtgccctgtgtcatggctccctgccatcttcaaagccagcaatggccggtggcgtctttcccaggctgtatcactctgacactttaaagggcctgtgtgattgcattgagccctcctaggctcacagaaatatgggaaaatattaataaaaattaatattctttatctaaaaggtcagctgattagcaacgttaatttcctctgcaacttgaattcatttttgccttagaaggtgacatattcacaggtcccaaggattagagcatgggaatctttgggggtcaattcaccataatatagaatattgagtgaagagagttgtttgaagacccttcttattcctaagaagaaggctcctgagggcatgcagtgttctgtgtataatatatgaatcctttaatggactcactactttccaccaacatttaaaacatttcctacctttgtattttaaaacttttaaaatgtgagatgctcctcttccccaccttttctaagccgctcagattttatgtcttcagcccatttcacaaaaagtctttttccagacttcctaatgtatcttaacttaccagtctttgataaattctcgactcccagctaccaagctaatgttcaaacacgttactgggtaaaatatgttcccaagcacctctactcctgattataaattgactatacattttagcttttcaaagttcttgctattttgccctcttaagagtaggaggtttgtgtattgaaggtttattatttcttaatttttccttttatactttgatggacagcctgcaagacgtttagtcataaagtacatgagctatgggctctgaccacatattcaggtcatggaactagcatgatgtattttctattccattttcatatgggagaatgtgccctttttcctggcatatcttctttatctgatttttccactcagccaaaccttgaaatacaaactgggaggttgtcattcaaagtgatggtgtggttggaaaagagttgggtaaagattcaagagctcagaagtgccgcagtatattttataaaatttgtacattgggccagaggcaacaatacactattatttatttttagacacaagtgaaaaaccaaatcctgtctcgtttacccaagattccgtgtacattcattcaagcatggaccaacacagagatgattacgttgctagcctgttattacttcagatcagtttcaggtggtattctcaatcagcatcaagatgcactgaaattcttgaccaaattctgactcacaggagatcctttgtcgctgcaaaagttatagaaaaaatgtgaccatgacatctcagagtttgctaagtgtaccctgcccaagaatttatttagtcaagcaggttttcaataattagtataggtaattctatgattaatgtctccagtaggatatttaaytcagcaatgttttttaggttgtaaaaactaaaaatcaaattctatggtaggagaaataaggaaagacacagaaaacctaaggggaccagaaattttttttaatgaacaattttttatgtgtaataatatcaggatcttattaatgatttctggttttaaaaagtataagcaatggaaggagatgtacgtagcctctcttaaaaagcaccaagaagaccagcacagcacttagaacttcagcccttaataaatatggtattgatatgaatagcaagaagaaggaatcgcttagagagagtgttgttttactggcaggtaaaagctcagctgaattattcggtttagttctctgatcttcaaactagagaaggtgttcatggtggacttasgagttagctattgcaaatgtgtttatctccaggtccagataaaccatttcccagatgaaagaacttaaagctagaataggaaaacctctgaatgtgagctttaaatgaatttcagaatgggaaaattgtcagaaaacaggacataagcaaatattattcttattttcaaaaatgaggaagagtacattctggaaaccagattataagtgagacattattccccagtataatttgagcattattattaaacatatggtttatacatatttagagaagaaacatatcttttacaaacctggagaaattcataaagatgtagtttatttcaaactaactgcatttcctattttgagagagtcattaaattactcataaagagtatgttcaaatttaatgagtcttgatttaaaggtgtctaaaagattcgctagtctcctttcagacaaggtggataagtatgggttaaatattatgtttattgtgtttgtatctggttggacygatggtctcgaaaactggcaattttgctccctgttcactcggtttccaccagcatgatgcatgagttggccctgggtagcttaccatgttcacccatgaccttaatgaaagcataaaagcagtgctttgcaaatgcaaatgacaaaaaaattgtaaatgatagcaaacagactacacaagtgttgtcaaggccaccatacatcttattccctttacaaataccttaaatttctttcccagtcctgaagcyctgatcataaggtatgcacagatttactaagaagctttgatgacccattgtgtttttgcattgactgaagccagtccatggatcccaggttaaggcccctggtcctttatgctaggagtgagaaatataccacaggagtttataagtagctcacagtggagtgggagaggcaagacatgaaaacagttttagaacacagtagtctataatgaggagttcaaaagggaagaaaccaatgttgttagaattaagcagcaggtttaggctttctgtatggagccccagatttactgggcagctgccagtaacattcagcgtcatgagtgctatgatttccacgtgttattagggaacactcagtgttcatgggacaactttacactttgcgtctcagctatttgcatgtgattattgaggctggctgccttttgtcttgcagttgaccatttcctgaatccattctcagttcttggcaagcccgggaagaacagctaacattggtccgtgaggttaataatgtcttcagctaatggctaaaataagaagtttgattttagctgcataaaacaaacaagttgcccattaagacaggcattaaaggctgcctggctatatttacagagtggagtatttccattatcagttaatttattgagtgctttccgcaagagttgtaaatgcagaagcctactggggccaggcagcaaagaagggagtgagaaaacgaggggaccatggtaaacagaacccacgccttccttaaaaggggcagcaggcagtcagctctagccaacagagctatgaatgaatgctcgcccagggttgccagatactctgatgtttttcaagaaaagagagatgaagattttgatatgaaatctgccatttttaaataacagcaactaattcaaatgtttttaaaaatacactctgggcaaaacagtttgcctgcrgrccctatctgtcccgtaggcagtggccagtttacaacctctgacctccctgttggtgtaaaaaagtgagaagaaaaaaggaggatgcaaaagaagtgtaagaacttgtctctgcctcccctgaccttacaacttatttgggagaaaaaagagggacccacatgaaaaaattaaatcttgacccaaatcggtgttgagtaagtgccaagacaagtggtatttctcttttatttttatttttttgagatggagtctcactctatcgcccaggctggagtgcagtggcacaatcttggctcactgcaacctctgcctcccgggttcaagcgattctcctgcctcagcctcccgagtagctgggactacaggtgcatgccgccacgcctggctaattttttgtattttagttgagatgggggtttcaccatgttgcccagactgatctcgaactcctgagctcaggcaatcgacccacctcggcctcccagagtgctgggattacaggtgtgagccactgggcccggccaaaaattccactttttaagtgactgtgcattctgatttacctacgtgtttgtcttgatgtcagggagtccaatgagcacaggcacagaaacagggaggagcatgatttgttggcattacaggagaggctggcctggacaaagctaagtggtggtgtctggggaaagtagtaggcagttttggaagtatgggctggctctaaatgacagctacccttgggtgctggtttgaggtgtttggattttatgttctaggccagtgttgttcaacggaacttcccgcaatgatggaaatgttctataatttgcaccaatgcggtagccacaagctatgtgtggctatagggcatttgaaatgtggccagtgtgtctgagaactgtaatttttaatcttaattttagttaaatttaaacttaaataagcacacgtggctgatgactgccatgctggggagtgcagttttcaggcggtgatgtactgtaacattgttgtaggggctagtgacaaatgaaaggcctgtgcaaagccagtggcagagcacaagttgtacagggttgagggagatgacacgggaaggcttttgtgttagttgagcaacaaagttgggtgcaaagttgagtaggaaaagatgtggggaatatttttgaaaagaaaattacatttccaatcagtgcgactaccagaagttttctgccattggtggaactagggaagtttgggaaagagtattgtgttattttgggattttgtttgtttgttgtttaaaaaggcaagagacctaaaaggaagcagaaggcgcagggcacgagtttacttgaaagaggatggtctcaatgcaagtcaaatactgatgctagacattcaagttttgtctgttttatatgtgaagaaatgacccagccccacctctccaaaacaaacagatgtcagggtggttcagtgacatatgccaggttaccttgcagttctttgttaggaagatgattagaagctccagtcacatgatgtcccatgttgtcatttgtccgttggactgggtcagtgtttcccaacaccagggccttgactgtcatgggaaacgtgcactgccatttgcctttcttcttgtctcacctcttcaccctgaggttgtcgttctaggcccctcaccccttcctcttctgtttctccygcctttctgggcctgcccacaataggcctccactgggagattctggttttgatgaccgcaggctgccgtggggtcagaggccacctgcctgtggcaccgaggcctcgcctacagtgtgcagagtctttttagctggttttcactgtgacgggcacacgtgctcacagcattcagaaagctccattgggaaactgaccagaccaggacacctacaggatccttgacccaaatgcccagtttttttcactttgttttatctttgaagaccttggttgttgcttcattccagtgtctgagacagtttcctatcagtggaggcaggcagcggtgaggaaggaggaaatagtacctgaccgtgaccacattccaaggaaagatgccttttattgctttttcaccatgrgtaagataatagctcagagacactttgatctaaaaggaagtatttctttaaatacagggtcttttataaaatgtttctgacagctggtaacactgtctgtctccagggagaaccgggtagtagggtccttagttggtgggaaacttctctgtgtaaacctttctgtggccgagcatggtggctcggtggctctatggctgggcacggtggattatgcctgtaatcccagcacttcgggaggccgagatgggtggatcacctgaggtcagaagttggagaccagcctggccaacatggtgaaaccccatctctactaaaaatacaaaaatttgctgggcacggtggtgcaagcctgtgatcccagctgcttgggaggctgacacaggagaatcacttgagcctggaaggcagaggttgcagtgagccgagatcacgccactgcactccagcctgggcgacagagcaagactctggctcaaaaaataagtaaataatacatctttctatgcatatttaattttgaactatgtgaaggtaataccagttcaaaaattgaacaaataacgtttcaggattttggagggaagaggggctggagtgtgttctctgtcctgaccattcttcttttccttcagattctggaaagccrccacttccataaaacaagcaaactcgtttgtgctaagcagcagttgtcatgaatagcagctatgctggtctctaggatgaatgaccctttggtattctaagtgtgattcctaatccaccttaatccaaaataccctaacctgctggttctcaaccagcaattctgcctccaccccccaggaagatttggcaatatctggacatatttttagttgttacaaagtgagggctggcgctactggcttctaggagatagaggtcaaggatgctgcgtcttatgatgcagaggatggacccccaaaacaaagaattatctaaacgttgttagtgccaaggctgagaagccttgttcaaatcaaactaccctttttaagaggagggcggatgtgagtccagctcttccagatactggttgataactgtaggcatttttcctagttgttgtgaaccttaatttttctcattgataaaatgtaattaattaatatctacccaagctggcttatagtgctgtgaggatcaaacagtttaacagacttgagcaaatactgggaaaagtagcatactaatgagtgaagtcactgttttgatgagcaagaatgcagtccctgagcctctgatttccagattagttctatggggacggagcactggattcccggggagaagggttacttagtctcctgggggtagctgcagtcaagcctgggcatgggaggtgagctgacagtactggggcatgatgctgtatgcgtcccaacagcaacaggtgtttaaaatcagagagaaagatgtgctcttactagtaaacgggtgccgctgtgctgaagcctaggcaacagagcaagaccccatctcaaaaaaaaaaatagtaaactgctgttgtgtttttaaaaattaagcagcaaggaggtgagctgcatcatttacagagggaacattttttaaataattccgttacacttagaagcatgtgtaatcatatcaygttaccatgcaccccccgccctgtcagatcacccctccaaacacttgtgcttctgtctccttcctcactaagtactaaagcaggtgattgcaagtctgcctttatgagttttaagcaggacattacagataattaagcaaaaagaattggcagcttcagattaaaacagctgagcgagccaacccctctcattattagcctgttgccctgaatggttcattctgaagtgacctctttcagcattcgctttggagggggcctccatatgttaagttacccaggtttgttgtacttctgccttctgattaactgtagactctctgtgttttggtccctaataccaataaacgtcacattgctgtctctaaaacgcgaactataggaaatcgtattctacacccaaaacttcctgcacggcttccttcactggcaaaaaaaccccacagtgttgttgagtttggtgtgaatggcaggcgaggaggttggggtgttcagtgttactgcagccagtggggccgtctgaactgtggcccgtgttctcagggcacaacgatgcttttgtttttcaattaaaaggcttaatataagcaggtgttcactcgcttccctgcacagctcagccaacctggttccgatctggccagcaggccccctttccctgaggcctgtggctcatccactttcaccactcactacctgccctcctttgcctgagcacataaaagagattttttttaaggtggctcttaagaagttgcaaaaggacatgaaaatttaaaattctaaagttctctgttctgaatttgggaaaagataacagcaatgtaatttaggttctagtcttacatctactcaatagtcgtagggaacataccttgtgcttattcagagtttttgctgttttatggagttagaatcattggctgatggaagaatgttatcaaatatattgagtttattttaaccagaagcctactaattcagtgaattgaagcctaattattaccaatcaaaagcaattttaaaagcaatgctaataatagagttaacataagtgcttagtgcatgcccgctatcattctaagcactttagaaaatacatttaatcttcctaacaaccttatgaggttatactattacgaccattttacagatgagaaaacaggtacagagaggttaattaaatgctccagggcataaagcaagtatgtggcagaataagtctgggattttaaccccaactgcctttcttcaggatctgtaagaccctacccactgcattattgtctgaatgctgtggtgtctggagggcagtgctgctcaagacattaaaacagtgattctcaattatctgcaatagtagcaggggtcagtaagataaactcagacagctttggaatgggaacaaattaatagaatttaactttttttttttgacggagttttgctcttgttgcccaggctggagtgcagtggtgtgatctcagctcactgcaacctccgctgcccgggttcaagccactctcctgcctcagcctcctgagtagctgggattacaggtgcccaccaccacgcccagctaattttttttatttttagtagagacagagtttcgccatgttgtccagcctggtctcgaactcctgacctcaggtgatccacctgccttggcctcccaaactgctaagattacaggcgtgagccacgccccaactagaatttaacaattttaaaatgttttccctgattcattggttccaaagccatttttctcatcaaagtgtatctcacttctgaacacagaatctgaactgtagcctcaagaataactttttctagaaagtatgtagtgattttaaagtgaaaaacaaaaaaatcccttgggcactgtgcataacactagaaatgggaagatgactaaagtgatcatttcaaaaattatccctgagtgcagaactcaaaattgacagtaaaggatgagatccacttgacagtggtgacatatcttggattgtcaagttaggagaagaacacattttaaaacctaactggcagttctgtagactgtcacagaaagagtcacaactcaataataatcttctcaatcacttaaaaacatctggtaaagaaagcattagctaggaggatgactattttgaaagtcattttcctctatgggaatccagttctcccaaatggtacactgtattttctggcaagttctgtttactgtctggtcctgtgtcagctgcttttattatgccagagaaaggaatatgtggcagctcagtcctctgcatgaaagaggcaacccttcaacatatcattaaggaaggaaaagaagatgggccgtgggctctgtgggggctgtgaaattaagattctcagtcctctatctgttctgcccaacttctgacatgcacgtacacccagacacccagagacagaaattgggttcaattactaggagacttctaaactattcatgaggtcttgctgcagttctttccagcagagttgatgagctactcttcctcttaaatcagtgttttctgctcatccaagatgcactgctgtctacttcattgcagatcaggaatcgtttggttattgagcacagggctgaaatgtagactgtctgggtaacattctaattttcctgagctaagttttcatattgtgaccttgccatttttatgggtgtgcttagtgcctagaatgtatgacatacatttgacttacgtccatgtactcattcatttctccagttgacaagtatttatttagcttggcatggtgctaggccttaaggggtggaacagaggccaagacagacatagtccctgcccctaataatgctttcattgtcatggtacagacagatgagaaagagtatgcacaatcaaataattactaacttttaaagtactatgaagaaaataaagataggcaaaggtactgctgccttttagataaggtattcaggggaccctccctaaggaggcagcacaggggctgggatcgcgagtgtgtgaaggaggcagtcaagataagagtggacgaaagagtgtgcttggcagagagaatggcctttgccaagccctgaggcaggaaggagcttggtggattcaaggaactgaggtggaggccagtgtgatgcaaggttctgagcagggaagagtggccgagtagcgtgacagcagcggttcccaatgggggcagatttgtcccccaggagacattagacagtgctgtcagaactgaggggagtaggtgctactggtaggaggccagggacactgcccccccaccccccgacaacaaatactcatcagccccaagtgtcaatagtgctaagttgagaagccctgagttagagaaataggcagcagcctagacaaaggttgtggactagaggagaaagaagaaaacaagtttgagattcatttcagagttgatattgactggacggggccatggttggatgtgggggtgagggcatggtaggaatgattgatcccaggattctaatttgagcacctgggtggatgctgtgaccatctgttgagacagagatgaatggtaggggggaaacaagtcttccaatttggacatgtgagtttgagaatgtcagagaggcaagtgggtggctggacatggacttgggactcaaggaagrggtctggggctcagcttcaatttgtcaaattgcagatgcataggcattggtgaaatagatggagaagagaggcctcaggaagggggaacatccatattttgatgttgcctcctaagatccttttccacagttatattcctaaaatacacaaagctggccaagtcactgccttattatcttccattggccttctggtaccttcagaaaatatccatgctccatagcgtggcatgtgagtccttcacagccatccccattgggtgggtcttgaccatctcctgccattatcttggacacgcacctaactgcggccgcactgaatgctgcaccttcctcttttccatccccattccttcccacgcaagctgatcactctgtgatgtcttcattccagaaacagctctatcattgcctttgtccaccctcccaggcagtggctgtcagtcaccctccccagcctccctcagcaccctgcacttaaccctgttatgwcacaggtgactttgttttgtaataattgttggcagttatgtcctgccaactgcactgtgagtggctggggagcaggagccttgcccaattattttgacatccagagggtcccacgcagcgtctggtacagcatccaaaggatgtatcacttttwtcttcttaattctaagattgttatagattttccaaagagatatgttcttgagcctacagttctggaggtgcaattagaggtgaaatatggggcggggctggggggctgaagagggatagaatttgtactgtggatgttcacagaaagaacactttgaaggtgctcagttccattcccttggctttttctgtttcaaaatggtagtgattacctgagttgtgggtcactgtacaggcatttgaaagttggctcttaatgatgtggcatcctgaagtcccctcatctgtagtctacagatggcttgtgatcagctgttcctggaagaacttcagcaatgaattttaaaaggcagtctttttccaacactgtcacttaaaggttctattctttccagatgttggctcaattaaaggcagcccttagatgacagtaacttgtcaggggaggtcaggatttgggatcgtttggcagcccatttctccagaacaaacatcatagtcaatgcccttttctttgtaacatgaaagaaacaagatcaatgattgttcaggtttgctatttcaaagagagtgagagggaacaatagcctagcagttttaaaatcaactgtatccctctcaaaatcatagaggagtgtagactttatagctgcacttaggacccagaaacaggcattgatgagaacagacagaacattggaccttactctccgtcttccttcctcaccagcagtggactgagaagggagtgtgtggccagggccatcaggctggctgtgccattgatgagctcatccttgtgcaagacaatggctgagcatagaaatattatagtatggcttgagtattaaatctaacactgtatgagaaggtaccaggaagatggtaattggctgtacaaatatcaaattgctactattgatgctggctccccacctactcccaatggaatttaagccctatgagaatggggacttggcagtccaggtattactagaattcaatacttagtgaaggccccaataatactgccacctactccatattgggatactgttcaaagtatggaattggaaatttcaaacccattccaattgcagattgggaccccattctccttctgtggtagtccttattattgactattgaaggtggaaggttgtttcaaaaagcagtggaattctgtggcaaaaggaaatctaaccttcatggattaaagacacctttttaaaaagcctgtgcctagaaagtgaattttttttttttttttgctttccgtcatattaaataaaaacgacaaattttctgttgtagctttaccatctctcagtgtctgatttagtttgaggaagctatattgggcttcaagaaccctttttcctcatctgtctctgactacacattcaaactgttcttcctgggacaatagagtttttctgggsagaagcaagtgccaccctmttgaaggacagagagtacagtagaatggggtgagggtgtatggttgaagacagtagggtaagggaaggtgggagtgggcagacaacatctaaaacccgttcatgggttttaaagaaaatcatgaacaaactaagctgcacaatcagcatagtccctcgccccaggttatttctttatttttaacttatttattaattattctaatcttggagacaagtctgttctcccattcctgacccccaacccagtgttctttggaatatttgatttggatataactttaagattacaaattagaggggttttaaagttgtaaatacaaaagagatttaaagcggtaaagtttcatttgagaacaaaatcaaaggatggagtcttctgagattctgcttcataaaaaacaaaacaagaccctgttttccaaggaagtattcaatgtaataaaaacatcaaacgtttccatttcctttggaatttggggtatgccaactcaagctgcattgatgtttatctctatgctttttattcattttttggagaaattttgtttttagcatatgggatatgtacacacatacatctacacacacacacacatatrtatagcttatttttaagtgtgcattttttttgtttttttttattatgagggtcctgaattgcttcagatgagttaatagatgggtgggaagaaactacactttatgataaagctcctgatttacctggtcaagggaaggctgtcttaccagaagccaggtggccatgccgagcagatgcagcatgtctcaggcatcccttggccctcagagtccctagtggggacacacagtggctggtatacaaagcagagtctggtcaaatctggggcaccaggccgaagccctttcccctcaggcttccatttccatgagagaggaatttaaacccacagtctactcctggaataggaaatgttacagacatccatgcccttcctgcttattgacccaaattcagccttagcgaggtcacttgggccggaaagcgttcagcacccagatggcctggaacagtatctttgtttccagctttccagcctcagaatgcctgtctccccacatgttctccctcagtagataaatctgggcacctgtttgtgttaggcagggatacagcagtgaacacaaggaacttggcccatgacctcaggaaaccaagttaaggggttctgtgcattttagcactttactaaattacctttaaaaatggttatcccatcttagacgtccccccgctaattaggggagccctgtttttccgagtcctcaagagtactaagcactgctcctttaaaaatgttttaacagctagataggtgaaaatgccttagttttcactttaatttgcattattattgtaagttagactttttcagatgatttttattgatttatgtgtattattatttatgaataccctttgctgtctgatttgtaagcactaatatatttagggccttgcatttttgttgcagatgcttttccattcttaaattagacttttacttttccttactttgtgtttttttttkttttttttttgacccaagcttttatatagtcaaatttgttaatagttcccttaaggcttttatctttgctcttattttgtaattttgtgctagtaatgccttgctttaattttaataatttgtaatgcaagacttcccatggtattcttaattttcaaaaatttcttagtgatgtttttacattttttccctctaattgaactttagaattataaggtcactatctctaaaaaaatttctattgtgatttttgttgaaattatattaaattaatgaattcagaaagaagcatctttaaacttgtatttttccttccaagaatgaaatgtttatgtatttattgtcttttatgctcctcagtaaacttttattttcttcatagattttatacctatttttagttgaatatatgtctgtgtaacttatatggggttttttgttattaatgttttgaggttttttttttcttttgcgcatgggatttttttttccattacattttctgactggggatacgttagatcttgatttatgtgagtttattttgtaaactgacaacctgttttttttttaactattctactcggttcatgactgattcttgggtattctaggtagcaatcatataatgtgtaaattatcatttttctccttctaaccaatattttgtaattggcttgtcttattaatttgatattcaaaaacagtatcaaagaattcttgtgataacagcacagccttgtcttacttgtgttttaaaaaacaaatggctcttgtactgtttccaagagtgcattctttgtacacacaagttattaatagatacataaataaaaatcccttggtcacgtacatttgggaagtgtcactctagtgcttccattagtatactgttgtcttttagcttgaaaaattattttctgcattaagaaagtttttttctgcctccaattttactaaaacttttttaaaaatcataattgaagggagaggaagggaggggagcaagggttgaaaaaactattgaatactgtactcagtaatggggtgacaggattgattgcaccccaaacctcagcatcgcacattatacctggtaacaaacctgcacttgtacccctgaatctaaaataaaacttgaaataaattttttaattaattaactaaaatctttattgaatattggctttttcatataatttaagctgaccatggaaaggcaattattgtaaacacagttagctttttgagatactccaagtactagcaaataataaaatcatgtttctcttaaaatattatttaattcagattttatatcagtttagatgaatgggatcattttatttccttatagtttggagaatgtcttaaaatttcttcctatgggtctactgatcacttccccataccagagtaatgtgtggaaattatcttaagagttagtgctttttgcaagttattttggggtgggcagtttgttgaaatcattgagaaattttggttttggcagaggggaaaaagcttgtgtttcttttgcctgaaagtctgtgctttttcatctctgttttccttttattgagaattttaatgtaatttcatgttatatttgggcctatgcttcttcatttgcaaaatttggggtgtggttgactgctaaatgccattgaagtctcttgatttcttggtggtggtggttttgtttgttttattctgtgatcatctcttgcagcagtcattttatgaaggccaggcaggatgccttgggacggggaaagagaagarggtaaagagtggggagaaggttacatctcctttcgagaaaacctgagttggtttccctttggtgcaaaggcaataatatcttgcatattttcccaccctcccttaaacaccctgtggattaggaactcaaatgactctataggtttaggaagattaatcctctgtgggaaaaagtagagattttctcccccttttctatgttcttggcaaagtgaatacaacagaaaattatcaaaatctgtcatgagagtttgaatttaggaaaattaacttgaatgtgtataaaacatgacactgtgctgccatcccaccggcccttcaagcctaggggagccctgatgtaaccagagcctgagatggagacgtcttgcagaaagaggaggagaaatgccagggtgctgtattcctgttaggtccagccatggtcgtctccattccagagaggtcatgacaagaccattttctacccagatggccaagtgtgtactcttccttgttataaactcatcacccattcatttattcaacaaattgtcctctaggaccactttctgggaccacacagatgcaagccagtctccttcatttcaacccagtgccaattagcatcaactcttggggctagtgggataaagagtgaaaatgttcgggtgcctcaagtaaacaggacctaaaagtattgaaagtatttcacggcccggcacagtggcacatgcctgtaatcccagcacgttgggaggccaaggcgggcagatcacctgaggtcaggagtttgagactagcctgaccaacatggtgaaaccccgtctctactaaaaatacaaaaattagccgggcatggtggcgcatgcctgtaatcccagctacttgggaggctgaggcaggagaatcgcttgaacccaggaggcggaggttgtagtgaactgagatcgcgccattgcactccagcctgggcaacaggaatgaaactccatctcaaaaaaaaaaaaaagaaaatatttcacacttgctatatgtattagtttcttattgctgcagtcgcaaattactgcaaacttagggacttaaaaacatttattatgttatagttctgtagaacagacatttagtattcttctggctgggctaaaatcaaggtgtcagtgtggctgtgttccttatggaggctctaggagagaagccttttccacaggggccacttacatttcttggctcatggccgcttccttcacctttaaagccaacaatggcagattgagtccctcttacattatgtctcactcacccgctcctttgcctcttctttttttaactcttaacaacccatattattacattaggcccacctggacagtctaggacaatctccctaactcaagatcagctgttcatcaaccttgatcgtatttgcaaccttgtaaagtaacattatattttgccttctaaggttacatatttgctggctctagaggttaggatgtggacatctttgggagacattgttctgtctgccaccatataatttcacaatgtcctcctctgtgcatctgcagctctttgttatgcctttgtcattactgtcagtctgtctggtactctcagtagataccaactgtgatcctgaggtgtagacatcactgtctcaggtctgtatttccttctcctcttctctttcccttttctacttcactccctccataaaatcgatgtgctcaataaatgtaccttcaatacctaagtctccctgtaatcaacttacataaataagaaatcactttctgggacataaacatgaacctggcttcaaatgcaacacgttgtgactgaaaagcaaatgtggctcaggttactactgttaacatgaagcaattcatgtttgaacagaattttcaaaatcaaattttgaactcactgctggagacgatgtggcccccttcatttcctggattattatgcatctcccacagaaccatttgctatattatttctttggtgtttacagaagcagatcatgtttatgaagcatgtccagaagaaggaaatgatatatggaaaatctctacntggggtatagagtcaagtgatccctaggttacagttgagagctataaataggccagtgacttcatgtgtaccatgggactggtattttcyatctttcgkcccacagtttggataaacttagatggattttttaatagttctttgaaaatggaacattagctatccacagagatttaacttgggacaaaaaaarggaataaaagtcatcatttctgatgacaggattagacagaccttttttcttgaaagtaattgaatattctgtgtgttttttgcagtttctgttgaattgagaatagtgaccatcatttgaggtggaaatagcagaaatgattaatttagaaagaagaaggattgtagggtgggtggaagtggcattttctgcattgtattcttagaaacttagactgttagagttggaagtgctctgataaaaccgttctttaacatacgagaaaacagaggcccaaataccttaagtcccttgtccaagagtatgctgagtgcagaaagccacactgtggctcaggtcctgggccctggccctcagcgtttctcagcccactgcactcatctccagcacttctgatggactcactggggtgacaccatcaaaccatgtgccccaaagatgccttcatgttggtttccacttgggcatttctcatgcttggatggctaatatactccctgcctggtttactcttgagaacccggctttcatctgctgtgggacacagtagcctttgcgtgagtgcctacgtgcacatgtgtccatggaggcagggagggtggacaggcagggagggtggacagtggtacacacactgcaccagcagcacttttaaagacaaggatcatgacaaaagcaacagcaagtgcactttcttttccaaattacccaaggttgttttttaaaaatagtaatatcacttcaagtgttttgcacttggcttggtgaaacaaaatgtgagttaaaactgtggagtattaaagcattattcttgacacacctacaatatgagacactccattgatgtggatagcatatatgcagacaacaagcattgatgttgtacttccacctatagatagaagggggatgtaccttggtatgggagttttgcacttagacaaagtcttagttctcaaccagagctgattttgctcaccacccctccagagggcatttattactgtctgcaggtatttttggtttttrtgtctggaggaagtggtgctacaggcaccatttgtaaagaccggggatgctgctgaacatcctacaatggacagctccacacatcaaagaagtctcgaatccaaaatgtcaatagtgccaaagttgagaaatcctggcctacaggaatttatgacttatctgmtactgggctttgaaggcyatatagacagttgattaatttagaaacagcttggcttgtggaataaacatacctggtatagtctgtgaactgaagtgagccaaggtggtcccagtattgcttccacacttgctgtctcagatctctgttctcagtgaccagagttaaaaaccagcttccctctgcccttcacgtctgtgggtcctatggttgaggatttttatgtattgtttttctttggggtcctgataaagcttagataaccaaacatagaatttttaaaggtgattgtgaatacaaagaactaaggagtgccttaccctgatccattctttacacaagcagccccagtcagggaaccctatgccaggggaggaattgggcctcagcatggacaagtcttggcaaagaccactatggcagcagtgtctgaaaaaggaaaagagtccaaggagggaggaaatgactaggaggctgctagagccttccctcagcgccatgttctactcacagaccaatgtagtaaaaatgatttgtatttccttgttcctttttaaatttttgaaaaaaaatttccatatttgggggttttccccattgccaggtggttacattccaaagaaattatatcatgggatacagacacaagtatttccartcatgcttattgtgtagggctgatggcaaggtgattcccctccatggccacacatcataaccaggcaagcccgttaagtatcagcaactggaagtccagcatcaggaccacccatccctctgtcaggcagccccggttggtggtggtaaatggaggagactgaggcctctttcactcacttaaattcggagagtgagccactctactcctgttgggaaaacctatttccttacccaacgagactgtagaaaattcccctcagccatataccatgccaggtttcttttacaagccaacctgtttccaagcaacccttcttgtaaccttctggagccaagtatctgatattcgtactgggagaaagatgaacggattctgcacagacacgggccctgccaacatgggcctgggaagaggggaagctggatgtgtggctcaggagacaggcagaggttgttagaggaagcacagaatactggaggtgaagataaagtcagtagttggccaggccttttgtgcaacggactcaagaaacatgtaagagaacaaaacatttttagactgataactgattacttgtgtacatcttgaaagttggctgctgcagggcctaaacaagagagaggccttacagtaggggttatgtgtccataggctcatggaagcttggcattgagatgatcttcattcattcaatatcatctactcagtcattcagccaacactgagttaagctctgagcaaggcattgtagttagatggcagataggttagcgttgttggaaagagtgtggggtcagaggtctgggctgcagaaacccaccacagtttcctctaatcatgcctgggaagggggaaccaagggggaaggaagcagccctctattgagcaatcaactatgcatcgggcacttccacttgtgttgtagcagcaggagccaataatcgtgcatttgggactgggccactagaagactggcttgttgggatcaagtcaaggggttcttggaaacctgctgagaacaggcccatcacctgacagcccagaaagatgtccgagtctggtggccagatccaatgggggagatccagtgggggagatccaatgggggagatctaatgggggagagccaaaggtgtttgttggtagctctgacrccaacttttatgacctgggcaacaaccaaaacaatttaataacgctctctcagagttcaagagaaaaggactaaacagaaataagcagcagcccagcctctacccagctggtactcctggaaattgcacatgggtgaagcaaggctgcttcctcctgctccacttgtgagaaaaatgactgcctgttctcctttctcagtatcggtctctaagagttgtaatccaaagaaggcaaaatacaattactttctgttgcatttttagagcagcaactgtaagtgggagggaaaaaaaaacagacatctagaaaatggtggaatgaaatatgttaaatcatacaaaacaagtggcttccagtgaccacctatactgaaaaataaatgaaatcagaaagtcgtatatcgtgtagaattttagaggaggaagaaattttggcaattctctaagccagctgccttcattttctagaggaggaaagtgagcccccgtgctataatgaagctgtctcagagtctcacagccccctggtggcagaaggagcctgaaactgattgtgctgcgtgttggtgatcccaaatgtctgtccatgtttgtaaattaatatggtggggcttatgaaatcaggaccacagtcattgtctgtgaatacttctctttttctacctttggtcaaaaagttggttggtagaagaagagctagaagcctagagccagagccgtggagccgtgggggttctctttcatcctatctgcagcttgggtagccagctgggttttggaggagagtgcatctcttccgaagaccttagttgctttccttgcagaagggctgatcctggcctccgggaacrggagaaacatagtaattttaaaggttatgaggaaaggaggatagggatcccgaaggccagggaggaaaagccagtgagtttggagcgtgggagctgcaggcaggtgggagaagctgaaggcctaacgtggctgttttatttgtttaaatgtacagggctcagaaatagaggattttggaaactgtattccactgttctaaaagagaaagtgtgtaggggggaaaatagcatcttgactacaatgtaatcctagatcttgaaacgtgaggttacatggacaaaaaatgcttaatcccaacttgaaagtatgcataatattcaaaattatcccccaccttcagtgctttacccaggttatggagattcttgaaaaacatgtaaatgaactttgtgtatgttagtctatgtacacatttaggaagagttccatttaatagtctttttgtaaaacatgatctaggatttatctttcatatgtacaatccatctgaatttaagtttcctcatctgtgggggtaatatacgggttatggtgagaaataaatgttgcaaataacttaatcttacacaaaataagcacttaacacaataaaatatatgtgtattaaaatatctcaatggaagtcattgcattagagtcttcaaatactcaaaaccagtctttttctacccaggaaacacctacattctaaattttaaagcccctttaggtaaatactgatattaatgtttcagattgttttgtttaaaattctcttggcattgttcttctgtggttttccagaaatatggccagaactacaaagcacatggtactgtaaacaattgctatgccagtcatttaaaataactcaattattaaaggagggatgtcttcacccccactctttcagaaaagacagcttggcctctaaattcttatgaatttagagagaagccattttcctcatcccttcttgatgtcattccttagtccttacatctgctggatctattctataaggagtgtttagggctggcatatggaaaaatgatttgagattggtaaacagcaagtcacagcaagtgatgcctctcactgtcagtctataaaatcactgcatcgtcaatttgaaagtgtttttgttctatgtatgattccatctcatttagcaacagttaccctgcccctttcttccttctaaaccttggatccctgagctttgcttttctatttcgtaaatgttatttattcctctaacatagataatgacatctgtgatataatacatgtatgtataattccctatcatcaacccttacagcttactatgaaaattaagaggaggaagaattaaactggtagagatttgaaaggaagagaaaaactattttgatttcttctagacctgtttcactaccatttattatattcctcattatgtcttttatatatcaagaaaaaaactgcaggaccaaaattgaggcacaagtgggaaaaaacatccagtgatccctaccccaataagaagcttcatttttatttttttctttttgtttgggtaaatggatagcaattaagtcctcctgtcttatgaagtcagagatttatctcttgaattaattaactgcagaatagtgacgagtggcccagtgaacactatcagagcactgagagatgctggtttatttcccctccttagctaaatacattcttctttttaaaactgaagaggtcagttggtgggatgaaaaagaaaggtttgcagtctcttgggataggcggtaaaagataacaaccagatcttgtatgccactgatatttccagagtatattaagtttccatgctggtttccacctttttaagggagttataatcatcccctctcattccctaaatcagcaacaacagcagtggttttgtgtgtgtgtgtgtgtgtgtgtgtgtgtgtgtgtgtgtgtgtgtgtgtgtaggtggggataacattaggccagaagggatggatgagagggtggaggttgctgagggtttctttgaggggaggttggttgtcctaatcttgttttacttaaagctggtaaacagcctagattctaattcctattctaaagattcccaatgttatagtgaaacctttccactttggccccatataggacaccttttcaattagtgcccatgtgtctgtgcacctgacatggcagagggctgtgatatgcccctggagaactctgtagagcagaggtttgactttggccctgacccatctccacacctatgggcaaagagttaaccatggatttgccagtcaaaggagaatgcaaattaaaagagtagaagctggcttggtattgcttggaaacaggcccatgtagccaataaacaagcagttggagtagccacatattttagctgggcctgtgctaaactgaaacacaaaactacaaagctgctatttctgtaattctatgtggggttatgacatcaggtatgacagttatgagcatggactcagggttaacagatctaggttcaagggccagctttgccacctcctcactgtgtagccttggataagctgatttgtctttctgggccagtttcatcttatgtaaatcaagagtaagtaattttgtacaaggcttggactacagtaagtactcaggaaaggccagctagctaatagaatggtgaaaagagccatgaacatattccattcattccccatcaaaagaagagtgagtggagttatggcaagaaaggtactaccgtaatgtgaaaagattccacctaaagatacctgatcatttcttacttcagggaagcccatcttacaggtcctttctggccctacagtgtaagactttaaaagacataggtaggcaggcacaattgcagtttctccatatctttctgcctaggtgtgtttctcaacccccacttcacccacaagctgctgttacatgttcctccaagagtccagcrtcccagtgagccaattagggaacacactccttatttgttattgcaaaagtatatatttaattgtgaatatgggtgtaaattcttctaaaggactattttaaattttaaatgaaaaaggctagagaagtgtaaaattttattataaaaaggaataaacaagaaccttatttggtagatgataaagaatagctatagtttctgccctgtgagagcatacaattttaataatcaaaactcttaagagaaggcatggaaattttattgttttagagcttccatggggactattttacaaatgcagtttaactttaattgctgtaaaataattgaacatgactattagtgtataaccataaaaaaatgaaaattataaagttaagagcaaataatacaattaatacacaaaaagagaatctgtctcactagtgatcaggaaaatggagactaraacaacaagactggcaaaagttaacaatattgatgatactggtattggtaggagtatgaggatagaatcattcttacacagcactctgttggtgagtatgtaaattgatgaaatccgtagaagacatcttggcagtacctaccaaaagtataaatgtgcatttttttaactcatcagttcttctaggaatcaaagctgaagaaatattcaagaaataaatgtataggagtatatgaacaaggatattcatcaccacattattttctattaaagagagagaacaagaaccctagtgtctatcaataagagagtagttaaaacaattgtggtacatacaagctatgaaaatctatgtaaccattacaaataatgagatctgtatagatggaagcatagtatttgggggaaaaaaaagcaagctgaaacaaagtatgaatagtacagtctcattttaattttatttttatttttgagatagggtctccctctgtcaacccaggctgaagtgcagcggtacgatctcagctcactgcaacctccgcctcccaggcttaagtaatcctcctgcctcagcctccccaggcaagagccaccatacccagctaatttttgcattttttgtaaagacagggtttcaccacattgcccaggctggtcttgaactcctgagctcaagcaatccacccacctcggcctcccaaagtgctgggattaaaggcatgcgccaccacgcccagcctcatttttatctgtaatgcgtgtatacagacatgtatttttcagtgtgtagagaaaaaagccccaaacacacactaaacagttgacagtagttaaccctcaagaataagtgtgagaagggcacattggtgttttactttctgtagttaagagtttttttttaactttttctcaatgagcatgggctacaatttacctttctaaattgagcaatggtatctttatggatatttatctttcagtctgatatatttttgagcctatattgtttttcaggtaaaaagcatttggttataggtccatagggtatatgcgcttggaatatagatcaaaacaagaaccagaatgaccgtggcttaagctaagttgaagtttatttctcacacgcatgaagtgcagaggtcatttacttgcctctgcagggtattcaggggcctaggtttctatcttgtttttctaccattctcaatgtatagctaacaaaagcgattaaagaagcctacttcatctctgtccatcacatctgtacacagcacaccccttcctggtgaggacgtgacctaggagtcggacacatcatttcctgtcccagctcaatagccagaaaatagtaatgtgatgatacctacctaaaagagaaccaggcaaaatacccagttgaaatccattactatatcacaaggtytccgaacctcagcactattgacatttgggctagataattgtttgttgaggggggctgttctgtgcattgtaggatgtttagcacatccctggcctctgtccaatcagtgctaggagcactgcccaggtgtgacaacccaaattgtctccagacacagccagatgtccctgagggtaaagtcaagcctcttgaagaacaactgctaagtaagaagagaatagatgctgcagacaaccagtaacatccgctataagcattgtgttatttcccccaaaacagtgcttagcactgaactaatatttcacctttcaaataacaagtcctctaccaggaaatcaaacatgctaagattgtgtcaaattttattttggttgattctaggatgaaaagtcaatcctgtcttattttaatctattgaatctaaattgatatttatatcaaataaataacaatttttatttgaatacacagacaaatgaaatattcttccctagtgtgtaagaatagtattaaggatattatastgtgttacatttataatgaatatctcagtttaaagtgtaatatttctgaaagactaatataacagcaaatatatacagcaaatataacagctctatcctaaatcaagaatttcatctgcagttgatggcctgtctctttttagggcaattaagtgtccataatttgatgctgctgtattatgaatactttaagagtacagtatttttctgttaatgaggagtgtttacttaacatgctcttcctttccaatgagggaacatgctttgctgccaatcaaattaaggtggagatcatttcaaagaaaccatgaaacactttttctttattctgcctctcctattaaatgttgagaagcaaatcttctatcaaacagatggatatactgggatcttgttaaaaggctgcttgataaaaagggaaagttaaatataaagtggatctgtgttgggcttcttccaaggttgtttagtgcctagtgtgtcagaataaccttgttataaggcaaattcaccacatggagtgttcgtgccagcctagggaaggccatcatttaatggaactccagtattcttatttttgaaaatgcagatgctgcagaaattatatcagaaatgtcgttgccaatcatgaaaataacagaataccccaaaagtcacgtatgaaatgattcatactgggagacgggagtaaccggttttagctcctgtaatgaacagaggctgtgtagaggcatgattggtaaagctggacctggaagagtgggtaggatactgaaaagagaatggaaaaggacagcatggaaagcccagagatcagtggatgcagagaccagaaatcacaaggcaagtttaagtgggacagtttggctaaagtggtggatttgcatagaggcaagaggatctctggcttgtggccaaaacagtaactggtccaccagagtttgtgccccctcttccaaagcacagctgggtctggaaagcagttgcagagccggccctccttgcatctgagccaggccgtgtggcttatccttactggtgtgctatgaatgagtcattgtctgtaggacctgggcagttaaaggatgacacacttaaatcggataatttggaaggaatttaagagggactctttttatgagaacacatggacacagggaggggaacatcacacaccggggcctatcggcaggtgaggggcaaggggagggagagcattaggacaaataccaaatgcatgcagggcttaaaacctagatgacaggttgataggtgtagcaaaccaccatggcacatgtatacctatgtaacaaacctgcatgttctgtacatgtatcctagaacttaaagtaaaattttaaaaaagaaaaaaagaaagactctgtttgcaaagatgtgggagaaatgcagggaaaccataaggggtagttcagtgtcttgaggcaaaatgtaccttgttacccgcctcccccacaccgccccccaagccataaaaaggtaagagaatggcactatttctagatcccagagtaggaatcatctggaaagatccacagagaggagctgtaacctttagaaggacacaaccagaccgagtcaaacccttaaggagggagggatggaagtaaacactttgacctcactctcaaacctccgtccagtcttctgccatggtgtcccattggccaaacccaactagaagccagagggagccctttgatgtggccttactgatggtaacccagggcacagagcagggtgaaggagggttgagggacaggcctggggtagatatcctgcactgtcacttcctggcaaaggtaggaagaagtggatattctctcacttctcctatcagccagctggactggggggattttacgatcctaggggctactagagctacagggatgcaggagccaggctctctgaatcacctgacaaaggcaagtggattatcattcagagacactcactgtggactaggtcctatcaaaaaataaacttctcttgaatcaagacattgaattttaggggtgtgttttttttataggacttggtatttgaggattgatttattacagcatttagcattaacaggaactcaaytgtagaaagttttgaaggccaagcaaagaatttggattcatttctacagatggttaaaaattagtggaggcttctatgctgggaggtggttttaaaaggaaaaacagaaagagagccttggaatgatgagtctggcagtcacatggcaggtggaatggaacacagtgagcaatccattgatgcagctggcccaaaccccatgtgatcagcgggacctgtgaatcagtcccacacaatacaagctgaagggatggaagcataatcatattccaagttcaggtgccagcctgccatgtagaacttggggaaggaggtggtctaagaccagttgaatgatcaccccactctatgaaagggmctggctggcccactgtgagatatggaagaggaaatttggaaagagttgttgatatgtcatgagtaacccacataagggagaggcttgggagagggtctgcccaccatctcaagcctagagaagggggcttctgtgagaccactgaagagtgtgctgtgtgctccctggagcctggaggatgcaatagactatagtatttttctgaaaaatcagaaagttttcagaagagaagttttggtcagctgctctgatgacggcaaaaccaaaaaaggctccttggggagggtgggtgttccaggcaaatgatatgtgaccattggaggacactgagctctagagagagctaatgtggggtcaccccagtcctgtctatgtgaagacctggaaaaacaacaggaaactaccaggcagaggaatgcaatagccatttgcgggggagaactgcagaccccatgagagcacctcacaagaaaaaaagatacatacctggacagccttttcagttcctggtacattttacaactgtactcttcaaaaaacacctttcctacctcttttctcctccctctagcaaccagtcagaaaagagaagagaggctcccaagcccctcccactgctggaggccggcttgtgccaggcaagctgggggaagagagagatggctaccaaaagcatatataagtttttattattattattattattattaagctggactgtacataccagatgtctagatgagaccatttttacagatctatgactgggaataaacagaaaacttttttttttttttttttttgagacagggtttcattctgtcatccaagctgaaatgcagtggcacaatcacagctcgctacaacctttacctcctaggctcaagcaatcctcctgcctcagcctcctgagtaactgggactacaggtgccgccaccatgcctgaccaattttttgattttttgtagagaaaaggtcttactatgcggcccaggctgatctcatactcctaggcccaggtgatcctcctgccctggcctctcaaaatgctggaattacaggtgcaagccaccatacctggacaggaccttttattccagaagccaccagaagggtcatagacctgccgtatatttcatgctggggcagaagaaaaatctaaccccagaatacatttagaggaacagtgggagacaaaaataaacttgttaygattacattttataaaagcacaatcattacataggtttgttgcattaaggccttgacctaaaagaaaaagctaaaaagatgagcaactcctaaacatgcctttgtcatgcctcaaaatgtattttaaaacatagtagcaataccttcattggaggacatttccatcccaatatataaaacataaaatttagaaaacttgggaagtacaaaacttgaaagcaaaaatcacctaatatcccgctatccagaaataattgtacattttggtatatttccttcctgtcttattttcctccgtggatatgtacacgtgtacttggtttttcttgtttaaattttatgatctgtattgtgtcctgctttttaaacttaacatagtatcttatttttctaagttaaggatcacttctaaaatatgatttaagtgatggcatratttgacgagtccatcaaataattttgtcaaatatgctagatccagatttaggtttatatatgaattaacaatatgaatgagaaaaatatagagaatttgactcatagctttagatattccatcaagttgtagtatttatattatcagatgaaagagctacttgtggagacggttgtcacccctttcttcaaactctctttycttggtttcagtgaagccatatttccctgattttcttctactgtgttagtcactcctacgtctcctccaaagcttttcctccttccatctattttctaaatgttgttgtggtttaggactctccttggatactcccctctctctcttggttttctcattcaaccccttggttttcaatatcatttatatgctaacaactctcaaaatgaaatattctctctaacctctatcccaagctccagacttgtatgttagcatctccagttggatgtctcattagcatctcaaatggaactctgaatctctgctccaaaataggtaccatcttcagtttcctcagcttggtaaagtgacttcagtcctctcaactgctgaaggaaaatgccaggaggcattgctggtacttttctgtcccttatttctagtttgcagcaaattctgtctccctccctccaatatatctcaaatccacctcctctgcccatcctctcrttcatcacccttctctaagccatcagtatctctatatgaaccactacaactgcccccaatcactttcctgcctataatccctccaatgaaactggttgtaggactatggaaatgatacagtttgtgggtaggcaaacctcctcctctctgagaggaagtgggacaacctcttgcttctgagttcttcaaatcatttctcaagttctttcctgtattaattttctattgcttctataacaaattactacaagctcagtggcttaaatcaatgcaaacttattatcttatagttctggaggtcaaaagttctaaaatcaaggtgttgacaaggctgcgttccttcagaggctctagcagggaatcaattcctgctactctaagtagcagccagagtgaaccttttcaaataagaatgctgttccctcattgaaacacatcaaaccattaggatggcctataagacccagatctcagtctgtccagtctttccagcctccagttctggcactttccctgttacccgactaatgaactcatatgatttgctttcaggtccccgaaccttactgcttctctatccctggaaatcaactcccctaatttcctaatgtgctttgtctttcctcaccacacatagtaatccaaaatgtcaattccttaagggcaagactctgttcaggtcacctttatgtccccagtttgtacaaaggacacagccagtctttgttgacacgacttgttgactggcccattctcacttttcaggtctcagcctacrgatcattcctcagagagacctctgagactccatcattcttgagtgggtctccgcccttctgacctcaattatttcacgctgttctttctgtcactgacttcatttgtctttatgcatgtgtatctttgtctgtttaatgtctctttcccccactagactagaaactcccatgagagcaagaaccacgtctctttttcggcttatgcttcscacaatgcctaaaataatgcctggctcatactaagtgctcagatctttgctggcagaatgaacagcctctgactgaatggggttctgagggaacctcttctctctgctgggggcaacacgggaaaaaatgccagggtcaatcctgaagtagaggagtgtgatccacagaataatgggaccccaaagagatctatgtcctaatccctggaacctattaagaagacattgccaataacttcacacacttggcaggtgtgattaagttaaagattttgagatagggagattatcttagattatccagatgggtccatataaagcgaagtgagaagatcagagtcacagaagatgtgatgagagaagcagaggtcagagggagacagagatttaacaattctgctggctttgaagatggaggaagaggccacaaggaatgcgggtggactctaggaactgattccccaccagagtctctgaaggaacgcagccttgtcaaaaccctgattttaggacttctgacctccagaactgtaagataataagtttgcatttttttaagccactaagcttgtagtaatttattatagaagcaacagaaaactaatacaaggaagaacttgagaaatgatttgaagaacccagaagcaagaggtggtcccacttcctctcagagaggaggaggtttgcctacccacaaactgtataatttccatagtcctacaaccagtttcatgcaatctctctctctttttccttagttctctcagtgggaatctatccctgtttctttctccttaattctctcagtgggacaaataagtggactatgacttgtttcttgagtataggttcacggagaggagggagaacctggagctgggtttgagctgtagaaatgaaggaacgtggaccaggtgtggcggctcacgcctgtaatctcaacattttgggaggctgaggcaggagaatctcttgaggtcaggagtttgagatcaacctgagccataaaatgagaccctatcccaacaaaaaattgaaaagattagccaggcatggtagcatacacctgaagtcacagctacttgggaggctgaggtgggaggatggcttgagcccaggagtttgaggttacaatgagctgtgatcataccactgcastccagcatatgttgtagaaccggggtggttactgaagaggaatgaaggagaaataataaataaatggggaggctggtcagcatctcccttcccatacacccatataagaattactctcttgctgttttgttgttgttgttgttgttgttgttgttgttgttaagactgagtcttgctcttttgcccaggctggagtgcagtggcgccatcttgggtcactacaacctttgcctcctgggttcaagtaattctcctgcctcagcctcctgagtagctgggattacaggtatgcgccaccatgcccggctaatttttgtatttttagtagagacgcggtttcaccatgttagccaggctggtcttgaactcctgacctcaagtgatccaccctcctcagcctcccaaagtgctgggattacaggcgtgagccactgcacctggccctctcttgctgttaacaggtgatactgaaccatttctttatggcctagtctaaggcaccttgtcagtgaatatctctgatttagaattagactctcaaaatctatggttttgggaaaatagatcttctcagaaacagagaaagcattggacctcatccctggtaaaaatgcmcacaagcaaaaattttcacatgtagtttttaggggttcataaggtcagcttgctcaaaggatagagtatttggtttttaaaatatatatcaggcgtgggagttggtgggaagcagacagggagtaatattctaagataggcttccagtgttaagctaaggggtttggacttaatcctccagggagggcactgagaacccattagagggcttcaagcaaggcactgacatgatcagatttgtgcttttgaaaacaatcactctgcaaacatctatattggccataatcccaacatttgttcatccattcaccttaggtggaaaaatgctgttgacatgaaatgttttaatatttccttttaaagccagtgatatcagatggcatattaagtgacctaattttatagatagtgtgctgtagaaagcagttttgatgtaaggacatcaaaatcttgtcagatcattgcttttctaagagatggtttgcttaggcatttggtcttattgtaactttcatcattattatctcattgttcgctgcttctcagcttttatcagatccatctctagcagagaaaactccggtaagtaaagcaaaattgtagaatgccgtattgggagccttctagaagaccagcgtatgcacacactagctaagggatttagaccaagttcatctcctggagccacggtttccttatctatactatggcattagaaaccctatgtagctatgtaacagttgtgacaatcaaatgtgatcgttaaaagacagtgctttgaaaaccataacatattacccaaatgcaagctgatattcattttcctcttagtattaccatcatatctgaacatgtttgggttaatacagaggagctgtgaaactaaacgtttgtggtttgcctttatgatgttatatggttctccctttctccaagtatcaaatgctttagaggtttttctagtatccaggcaacatattgcctccacttagcccttgcaaaaacctgaattaaaaatagactctgtttgctgtgttctgaaacttaaacctatatgttttaaaggagtcaaaggttccccttggcactcaaaggggcagtagtcctgtcctagcacttttagagcatatgccaagccatgcagaggaaagtggagaagctcagttgtgcaaagccggcaacccaccaccgtgtcactggtctgttggtggtatcctggaggaaggaagggagctctggcggcttagagttttcagggaaaggactattggttctaatactgcaatcaccaacacttcacacagaaggttctttgtcatcatcatgatttactaatctcatcagagacactccaggtagtgtttcacagtgttttttcacagtttcaaagtacatctggcttaatattaggatgtgcctcagacatttccacaaagcagacaagatgctttttttctattttatttttttaattgacaagtaaaaattatatgtatttattgtgtacaacatgatgttttgaaatatgtatacgttgtgaaatggctctgttgagttagttaattgaggtagtgtgcatttcctcacatagttattttttgtgatgagaacacttaaaatctactttcttggtgatttttaacatacgatcattgttattaatgtagtcaccatattgtacaatagatctcttggacttattcctcctatctaactgaaattttgtccttggaccaatatctccccaagcccccagcccccaaccagcccctggtaactggcattctacttcgagttcaacatttttagattccatatataagatgctttttagtgatacccaaatatatcactattaaagcatttaatttttacacagacctggggaggaggaaactttgaggtgtcattcctagtatgtcagcaaaatgccgccttttgttaatagtccccatgttaccagtggtgacattaacgatggtgtttgtacagctttaccaagaagtttacaagtttttccttggcttacccgtgggtgggtatgattggaagaaataaaatttttacccttttttcaccaaaaggaatggctctctcagagcttttgctttgttgaggtcaaacattcatacttaaaagagaacttccgactttgattctaggctcattttgcaaacactgatatggaggcagcctgaatttggcagtcagactccaccacatactagcaaagggacttgggcaagtcacttaaccttgctgagccttaaatccacctctgtaaaatgggaacagttgttactatgcctcacggttctggagagggtcaaatgagtgaggagattctgatttagagacagtggagtataacttgggactctggagccagcctccctagaggtgagtcccagcttcaccttgtcagtagctgtgttacctcgtgtaagttgctaaaccttcctgagccaatagaaatagtaagagtgcctacctcatacagtcgtgaggataaaaggcttaatataaccagaaagcacttagaacagtgcctgccatttagtagtaaacactacattagtatgtgctatgattatgatagattatgatcataattgttattattcatatatcaagtgcctggcataaattagttggtcaaaaaagattaataactacttttattatttctcccatcagagcacctgaaatttaaatgctctgaaaggaaagtaatattattaccagtctgtttttgatttaactaaatatataacagcagggttcttttcaaaatcttactcctcagggactcaaaacttaaccttacaccagaggagaaagatttttttcttagaacaagagcatatatttggtcctcactccagacctttggaatcagaaattctggggacatgaccgtcatctgttttagcaagtatacccagtgattctcatgttcctgaagtttgataacactaggtgtagactagtcacagctttgactaccttctgttgccagggtggagacaagaattggttactctctttggcaggctgttccagcccaagaagtgttaaaatgatgttatcgtggtggttttgtgagttaagcagatacagatagttctggaaagcagcgtcaggggtgcggtgcgggggctgcagagcacttgggcagcatgtgaacctgttgatagatctggcttagaacagtgtggcgtatcgggccctctgggaagtgcttatgtcacgtcttgtgccttaccagtctgagtgacgcatgggagaagagatgccttttgagtttttatgcaaggttaaaatgaagaaaatccatttcagcctttaaaagtcagagctactggtacaaaaggtcactgacgccaaatggtggcattgcagagctccgagagggagcattaaaatagcagggggtttttttgtttgtttgttttttgttttttttttttaagaaacactgaatgcactgtgggcttaagtcttagtcttttgccatcttgctgccctaggatcttaaataaaagggcatgtgaaaaaagaaaaacacgaagacatttttctacctccttaagtgtcaaggatgtagatagtcgtcctcacactaaaggtgacataacctttattgtagaataagcaaagtgatgaaatgatgcccctatgagaaagtagtctgtagatggactagagacctagccctgctctagatgtagtctgtttggaggtcaagtttggataactgaagatgacactgccttgggaaatgaagccagtctcagaagtggtgtggagaggttgtaagatattaatctggctctgtatacactgcattcgtgttgacagaacagcatcccaattgattgaaaagaatctgcgagccatctgaatagaaacagtatttaagtcattaagaatggattgattaccagggcaattaaggagacctgaggatcaaggaccgaattcaggggacactgcaattatagcaaatacaatatgagaggtcagagaagaagtgacaggagagactataagaaaagctggaagtgggccgggcatggtggctcacacctgtaatcacagcactttggggctgaggtgggcagatcacatgaggccaagagtttgagagcagcctggccaacatggcgaaatcccatctctactaaaaatacaaatattagccagatgtggtggtgcatgcctgtagtcccagctactcaggcrgctgaggcatgagaattgcttgaacccgggaggcagagattgcagtgagccgaggttgcacgactgcactccagcctgggcgacagagtaagatgctgtctcaaaaaaaaataaaaaataaataaataaataaatatatatatatatagaagtggctccaggaccatattctatcatagaaatcaagagaagacatttttttccagaatagacaggtgttctctggtgttaaaagcttgaagaaataaaaagatataaagcatgtggggaggtggggatgggtcttagatttgctaagtaaaaatattaaatcagaaagaaagtatcttttctataaagtaaatgatctttattacatccattcatgtcagggtttcttaacctgagcattattgacattttggtctggatgattctttgtggtgggagctgtcytgtgcagcatccctggcctctacccactagacgtaatgccaccacctccagttgtgattaccaaaaaatgtcttcagatatcatcagatgttcctggtgaagaaccactgatttaagtatttaattcctaccatgtatgtagcactacattaggcagtgcaaggcataaaaagtatgacacacttcaccgtaaaaaaatacattctaattgtcctaaattgagttattctgttatttctcctattatgttggttaaaactatatatgtgtatactcatacacacacacatacacacacacacgcacacacacacgtrtacagtagttattctccaagttaacattacatcagcttaattattggatgatattagaaaagtagtaaatgggaaatattggtgtccccatgctgtatgttttagcacagattaatgtaagaaattattatggatctatggtgggactagtaagcaatttccaaattaaattataagaaacattatcacaaaaaacatttgaaaagaaagagctttaatgtttggaatagattctgcatcaaaagaagcaacttatcatcttgccaaacctcagcctcgtcattgttttggagcaagaaagagaattgaacctcactcatgttttgttgcctgtaccattgaacaaggccctgactgttaagactaatgttgagacccttgttttctttgcagactgcatcatctgctattaaaggtgctattcagctgggaataggatacacagtgggtaatctcacttccaagccagaacgagatgttcttatgcaagacttttatgtggtggaaagtgtgttcctacccaggtaagaacatttttatttgtgatgatttccatgctaaggaaccttctttgtgacaaccccatattgaagggcttttctactatgtacatgtttatatgtacagatgtgaatattgggcctttggcagggccaaaggcagtccaaatgatgtttacttcctgtttcatcaggatgtctcacaatttttatgtggagatggtaaataggtttcatctatggactaattctaattagttgtgatgaatgcctggaagaccatatggagaaagattttgaggttcagtgggaaagagtgcagtaatcacagagtaatgtccgccaagggtttatagaaagaaggcttccatgaagcagcaactggtgctaggtttttgctccccctaatttaaaagcatgggctggtaggcccataattgggcctcaaatctgagtttagtcttatctcttctcttttatgatgactttaacttaactttcctcgagaaaacatggataatcctgctgtttgcaaaaataccaaagttacccatatatgttgtctctagctttcatcattttagggtgaggggatcaattatttaaaaacaaatacatctggaaatggatgatggtaatatgaatgtattaatgccacaaaactgtacacttaaaagtggctaacatagtaaattttatgttgagtatattttaccacaataaaactaattaattaaaaattctattactacgttcatttaggaagagaagaagtaatcattaaataagtatcaccacaagtgacaggatttttcaaatgaaaaataaaaatmmagaaaataaaaataaagatattcaatttggggacttgtctttggagctgtgagaattgattttaacatttctcttaaaaataagtcatgttattaccaggcttgggtaaacatagctaaagtgacactttgtttaccactagtgtcctcatcaccttattaaaaatctatatgtatctttagaataattgtctttacacatttatctctgtgtctaggtgtcaactgcctaaaaataaaacctgtttgtggacatgcagtaacccccacatagtcaccaaggagcagagcccataaatttttaaaagtcagctacctcgttttgctttaaatgctcttagctgcagaataaagttggtctactggccttttgaagtctgcttgtctagggtcctctagcagccatgagaaccagattccaggcagaaaatggacaaccgcaaggcccaagatataatccttgcttatgatcctactcttctttctatagttggaaatgttctctgtgtttgtttttaacagcctaccattccaaaaaaaaaaaaatgtatattaactacatgtttttctcttaaaagccagggggtcatgagtttatcttcatcttttggtatgatttttttaggctcataatgcttgtaagtgtgtttgcaggatgtttgtttgagctctcatggtctccaaaggtctctacccagacatttcaactttgttgttctttggctacaaagaacaggagaaatggaggacttctgtgggagtgtggagacagtgagctcagggtgctgagagcattacagctgaaggtgggggtataaagacgttccatgtgctccccctatcctcactgactgacctcttctacttccagtgtccaatcaacacagccaaccattgacgggcacttggggaaagcatggctcaggcatgaggtccccaaatcctaaacactggcacacctggaacttgctagacatgcagattcttgggctccacccagaccaactgaattagaaactctgtgggtgggaaccaggaatctgttttaacaagccgtcggggtgattctcagcacagaaaggtttgagaaccactggcctcgcccatgactttccacttgagagagagaatctttctggtagataacaaattttgttcttggagttattacacgactcttacaactaataaaactcaaatcattttttaaaagcatcttaaatgtcaaaatgacatctattagcactttgcntctttggccttcactgtcatccaaggtagcagcagcaggtgtgtcactggcagaggagtagctagctgactttcccttatttagaggcatccattgtcacatttaaaatatagcaatttagagtatttgcagcctataaatgtgcacacctgtaatcccagcaactcaggaggaggctgaggcaggagaatctctggagcctgggaggcagaggttgcagtgggctgaggtcctgccactgcactccagtctgggcgacagggtggtactctgtctcaaaaaaaaaaaaaagaaaaaaattacctccctcattttctttataataatattgtgtaaaatgagtaaaagtctataagaaaaactttaaaaattattaagtgatacacgtgtgtgtgtgtgtatacatatacactcatataatatatatctacacacatatgcaatggagtaataaaaatactacataataaatataaaatagaataaaactatttaaaatagatgcatgaaatagaaaggctaaatagatattgatgtttgcatgtaggcacatttagttggattaagttagatttaaattgtccgatagagaactgtgcatacaattacaattacaaatcaaccctttctctgggctgtctaaaataatcaggtactagaccaaaaaatgacatgctgtctgccttaccttttagtgacgatttgtaggaagaggaaggtgggggctggtgagtggaaagatagtagagtttgtgagggaatgttctgtgtgactgaagacaaaggctggaggttcatggaccagaaggtgtgaatctactctgaaagacaggcaagagtccagtccagggaaaaaggtgcagatggtaggattttggtgggtactcgaattaaaaaaatggatttgtgaggcaatattgctggggtcaaaaccaaaaaatcaaattgaccagagtgaaaaatagcctgggtcctagcatggctctgctgccacgtaggatgactggactgtcccttcaggttcgtgtaacaatccatactacttatagtatacatgaaatgctttctattcattcaagcaaccttactaaaaacaccccatgaaaataaaagtctatatcttcccttcaaaaaaaaatggcaatacaatatttaacatttgatgcatttttttttcttgttatttttaaatgaaaaagaattattgtcccggtttggctctacaccctcggactccggctcccacgccaccctggcaggtgccggcctcaacatttgattcagaccaagaatttctttcagcagatgctatcttgtttgtttaagtaacacaggcacaccagatggatttayagtaaacagaagaaacttatgttagtcttgcctcagtttcatcatctggactcagtgtcttcgtggatttagcaaagggatttggcccagtgtttctcaatggaggtgctattggctttgttggataagacaactctgtgcaagacagtacctttcaggagatctttggtccccaggccctgccagtaatatctcctagttgctgtagcagtcaaaaaacccctataaagtgatggataaatttagtatcatgattgtggtgatggtttcacaggtgtatatacacatgtgtaaaagtaacaaatggtatactttcttgtatgtcaattaaacttcaataaatcagtcaaataatgctttctctctaagtatttccaagcccatatggggatgaagaaaggggtaggtgggcaggacaggccctggttgtaagcatccaaaacattctgcagtctctgatggctcaacgagtctatctgggtcatagaactaattacttgaggtaccttgagatgttttaatttactgctttctgaagttgcagaatccgtttcccctagcaaccaaatgcattgtgtttttttcttatttatatattttgaagctgctcaaagttatttttaaatatcaagtacataatttgtcctatgaattatttcattttggagatggaaaaagccctgggcctttttaagatttgaaagaggatataaaaatctcttttaactgtttggctccatgatcttccaaaatgtgttccaaaatctcaaagtagataagtaagaaaatcatgatcatatcttaatattttgaccccaaattctgtgttgggatcagaagctcaaggttatagataggtttcatgcattgataggataaagaagaaggaggatggtttataaagcttgtaccatgtaaacaaggacctaaggtggcaaagggaggcaacatttttaaaaactaattgtgaatcaagcatagttttattcatatagtaaattgacttatataacatatattaatttttattatctttcatctttataagaacactatttggtatatgaaataatttgaccctaagacattaagtcacttagcccaaggctatccagccagtaaatggtaaagccgagattttaactcagggttagctggccccaaagttttgtttttctctacattgtggcaataaagcatgggaatggtatttctgctttattgaatcagaacaagtgtccagcttttatcttagaattatagacctcagtctgcttctttgttcccctaagagccagccctaatctgttctccaggagacactatcactaccttacctggaggtggcaaaaatggtttaaaagctggtggtaaaagtttaaatatctttccatattcaagaataattacacagctgaggaatttttaaagcccctatatttcagtctcttcacttgtaaaacaggagtttaccctgatgtaaagatcattacagaaaacagactgcccttgggtttgacccacatgcacttcaggatttatttggacagccagggaatacccaccttttggaaaagaattccaagaaactacggcaagggtaaaacattatcctaaatgataagcaaacatatatgtcaaagattcatataaaatattgcctcatatcatcactcaatgttacaggtttgacaaactagccaactgcctgcatttctaggcataatgacataaacttakccaagagtccatcttataccagggattcccaatccctgggctgtggacaagtaccagtccatggcttgttaggaaaccagcagcacagcaggaggtgagcagagggcaagcaagtattacaagggcgagctccgcctcctgtcagatcactggcagcattagattctcataggagcacaaaccctgtagtgaactgtgcatacaagggatctaggttgtttgctccttatgagaatgtaatgcccgatgatctgagatggaacagtttcatcccaaaaccatccccccatttccactgtctgtggaaaaattgtcttccacaaaactggtccctggtgccaaaaaggttggggaccactgtcttatatcatgtgggtcagcatacaacagcccatgggacaggccccgctwactgcccgtttttgtaaataaggtttaattggaataaagccacatccattcatttacaaattgtctgcggctgctatctacaatggctgcagagttgagtaattgctacagagactgtatggcccacagagctcgaaatattatctggccctttatagaaaaagattgccaaggctggctgcagtggctcacgcccgtaatcccagcactttgggaggccgaggtgggaagatcacatgagctcaagagtttgaaagcagcctgggcaatatagtgagacctcatctctttatatttaataaaaataaaaataaataaaaaagaaaaagattaccaactcctgatctatacaaacattctgcaccagtttttatgtacatgtgggtagaagacaaagctgccagcttagtcttcttgggagaaaatgagaagtgactgctgctgggcaagccataatatgatgctccttcaaatcaaaactctttatgtctttgttcagcgtgtatttggtgaggatggggagaaactgatttcctattactaaaagccatatacctcttcctttagctcaaaggatttattgcatgcactggatattatacaatattctactttatttgaagttatcttcaagcacggttttccagtatggtaataacttcttggatggtttaatgtttatataaccgatgatgtcacatgttcccagtaaatgacatcccggaatgcactgtttggttggggaatttaagctgtcttcagatgctgacttttacagattggctgtcagctggttggtctctgaagatggtgcagcctcgtcttatacaatgcagttcatgtgtacccatcacagaactgctcagcaacaggaggttggcaccagcaaggaatgtgtcttttgttttgctttgttttgtttttccattcatgagcactctctaatttggcaaaaaagaggaccaatttctgtctctctctctctagttacgtaaagaattgtatgtggaaaccaagggatatccaccttggctgaattggcagaggcaattaataataccttaaggccgcttttacagactgctgtgtacgaaggtccaacttgaagactgggtaccatcagtagtttgttactggattgtagtggcattcacccaactgtagtgccacttaagctttcctaatgtctgcacatcaagacaaagcacccttcatttatcctgtcatacagagggtaaggtcatgtttgttgaatacaagtgagggcatttagcatcctttagcgacactgaccactatcacccaggagttgcgtaagtactagttttgtcaaaagtcctcagagccactattgatggtttggttacaatttgaaataaacaaagctcactaaatggaaaatgctgctctagaggcaagaaagctctgagtctcagctccaaaactggtccccttgtgttgtctttgagatgctaaattagttttaccccattgcttaccaccacatctctcagtccagtgccaccaaaactagcacttggtcatcaggctctaaaaccccataaacaaagctgtgttgttattagtacatagagaggagaacaccaactgaccaaagcttctgtaagtgaaattctacccaccagcccctgtggtgtgaaggcctcatgtggaagtaattgggatatttgggcagggagaaacccctgaaacttgtaacagaatcctgaaaaggaggaataacagaggaacgtcaagtctaagttaagccattcctatctgcttatgacttttctgctgttctgatgtgagtctaatctcccaatcttgtttgttcctgatcagtttgggccattgttttccctccctggactatgatttatctgctaaatggggaattccagatggcggctaatgcttcctcaagcttcaacattgtgtaattctgaacatacgttgccattaagatatatgtatttttagactaagwcaagcagtagctttggccttaaaaatgaacttgcctcagaagaggtgaatatcagaatgccagagctggtctgtgattgaactttaactgcttcttagtgaataagtggggaagaggacagagaaacttctgttctttatttgaaatttctttctccttttttggagmtaaaaatgccctgatgtgatagggattgtaacgtgtgcttgcttaattgtttaggttcttacttggcaaaataaagttggaaatccaaggttggattccaaacttttgttgtcgaaattttactggcccatgggatccaagcatctagaaccactgctcaaaaccccatagctgagatttccaaagcttcaacttacgccaagacaagaaagtcagttgtcgggtgtttttttttttttttccacaccctacataagtgcattgaagaaatataaggtaaatcttaaactgtgaggagttctactctttttctgacttcatttttgctaagtctggatgctgagcacagttactcaacaggtaactccagtctcaggcaaggaaagcctgtggacttcaggaggcaaacgttgattgcggtcattgtgtttgaatgttggcagttctgccatggtggaagttgctaagcacttggtacctgtgctgtggagattctgtgctgaacgcctgtgggctggcacccacatctacacacagtaaatgtgccagcgtggggcctcagagaaccaaggttgttgcctgctggctgaccttcactggacttgctgttttgttctctgcactcgtgctcccctgacaaatatccgggcccagcaggggccagcgatctcattaatttgcatttccttcactagagcttcattcatgtcaagctggtatttgttattcattggaacagcttaaatatgcagaggtaaacaaaccttctgctgtggtgctgagcacggagggctcagtttgggggaagaggaatcagtttatggcttttaacctctaactttttaaatttatttaattttgtgaatgataatacacagcaaggcttgtcctgttcttaaaaggaatactgtgaagagttccttttgtccctgtgcctttttttcagtgtccagctccagttatcactgttacttgtggctgttttttccttcaaggattttttatgtatatgcatgccaaaagaatatttgttttcttttttatgcaagtggtgacatcccctacacagcattctgcatcatgtttcatccacttaacaatttatcttagagatcttgccatgtcagtacataataagcacccttattcttttcttaataccacatagaattccattgtgtagctgaatcataattaattagacaagttctctcctgaaggccatccaggttaccataatgagtaaccatgttcacatatattgttttggacaaatgctagtttatccataggataacataggcatgcatttgctggatcgaggagttacatgtttgtaattttgatagaagttgtgaaaatgtccttcatggggaaaaaaagtctcaatttacattcccactaacaatatttcagaatagcattgcccctcaagctacatcacagtcgtggattttcaccaatcttccaggtaaaatggtctctcggtgacatttattttatgaatgaggttaagcatcttatgtttgagtcatatcttttcatttctgtgaagtgcctgatcatatcgtcagctatttttttaagttaactttctgatcttttttttttttttttttttgtctgagacagggtcttgctctgttgcccaggctggagtgcagtggcgcgacctcggctcactgcagcttcaacttcctgggctcaagcgatccttctgcctcagcccaccaaacagccgggactacagatgtgcaccaccatgcccagcaaatttttgtatttttcatagagacagggtttcaccatgttacccaggctggactttttggacttctatgcagttcattggagctctttatattaggagattagcccattttctgtgatatgagttgtaaatattttcccattttggcatttatttttcttattttttttttaactactttttcaatacattcctcatgtgaagtgtttggctcagggctgtttcctatatagtctcaatcatccaaatgtgttaggggctccctgcattcaaagtactttacctttcaccttttcatttactaagccacttaatttgtagaggttctgtactgggcctcgtgaaactcagcttttaaataacagagataatttgaacccaggtctccctggactataaaatccatcatcttaactaccacacagtgtatccagtaggacttaagagagtacagcccagtcttaatattaaccaaaggaaaacagaagccataaaataaaacctactaggagagaaaacaaacaagaagttttgatgtactatgaacctaatttacagaaggcactatttgagaattttcctttccattcacgcaaatacagaggttcaagagtgtgtaacctcagcaattaattgttatttcctgtatgttaattacgccatgaagcaacatccattctgtatgatgcctccattaagtattatgcccactccttttcattttctctgtttatacaaatataatttcttgattatcccatgtaggtaagcctgcctcacagttggcccatacttctccatgtcttaatatggcccaaagatagctagatttaattctttttcatggaatgatttagtggtttttttgaatgaccaaatacctgttattatttctgtatgcctaaggaaataaatgttccccttctctacctgaagctgctctgctgtgtgtacatgagcattcttgtgtgtatgggtgtacgtgtgtctgtgtgtctgtctcacctccagggaaacctaacactatcgttttataccataactgaataaatcacagcagtcagagagatgtgaacccaaggaaaattattataattaatggaaacttcagggaaagatgaataatccaaggagctcagaactaacccaaaatgaaaataataatagtaaatgcagcatcctctctgataaaatcttgggcccaaaactgcaacaaaatgagaaactccatttaggtggaacatgggtgttttatcttacctctttgaatgttgaaggaaatctgctccagtagawtgagttactttgtatgagatagaaggtgaaaaagagagaagaaattggcaacactcttagcccactgaaagcagcctgcttcagaacctaaggccttgtggttatttttactcgcttgcaaaagtgaggaaggatgttataggtctctttgagcctctttgcttttaccctttatttctatatgatctacatttatattaataaattattacatgccatataagttccagaatcattccttttgacagtcccatgggatttaatcccctcctaaatcccaaaatatagaaagagaaaatgtttgggtacagcactggggcatcatgcatactgaatattcaacaataaccatttgaatgagtggatgatttgggggtcattccttactatgtgactgctcttctctcaggcagtcttagtccctgtgtcactctcctagtgtgtagccgggctgctgcctgagtgtaatcctagcctttcaagataaccatttattatatggtgctgacccctaacaacacaagccagctccatcctctggtactcagcaaaaaaaaaaaaaaaaaaaaaaaaaaaacagtcatctrtaatcgtgcaggaggaaaaactagttgcgttggttatattgaatagatacttcctaaatagttttcaagggtgacctgtgactatgctgaatttctgccttacatattgattttctaatgtaaattccatgtaataatcaaatcttctctgttaacattatgttgaagactcattccttcactcaacaaatacttattgagtgtctgctatgtgccaggcattgatgcaagaatctgattgatctsaacaacttaaactatagtagatccaaagtgtttattctgtgctgaaagcctttgtcatttgcccagtcctttttgtgtggtatccataaaaagcagaccatgataaacttgcataggctctcaatgtcccacctagaatgtagatcaaagggattttgaacctttacataaaattctattgcattgttctaatttttctgaaaattttaagaacaaaaacactgaaaaatttaagaatgagtggcttaggtggtttgactgagctcatgtattaggtaatattgtatggagtcaaagaataaaaaggatgagattgataaacatcaacatttaggccagtggatccctctatggatctgagcagtaaaaagtacagaaggggcttcaactgtatggataatgttttatgtcttaagcagcattttggattcattgatattcactggtttattctttgtacattttatatatcataaatattgtgtataatttttcaaaatgaacccagaaaaaggaaaagaagataatgatatattgaggaatggaaatcaggttttaaattttttaaatatgtaaggtctccttttttggaaaatgtaaataaaagagttcagattggggtcctattccatgtgatggttctctctgttggtaggatgttttaaraattatttcacttatccctggttaacaatgtttgtcaaatatccaaaattcgtggttaaaaaaatgcatttttgaaattgctccacactctaaggcctagatcttttacccaaagcattacaatgtggttacactggtgataatggagtgatcttcccaggaagaaggcacaaggggataaatgaattttcaggcatgtgacactgattgacagggaaagcctgcacggagtgacctcactaactaacgtcttattctgcctggttatcattggcctttatgacatgaactttgagaaacccgctctcaggggatgatttttctagagataacattggcccaggactaatagagctacaatttgcggtcaaaattgtccttgctaatgtgttctttctttctctctctttttaatattttgacttcagcgaagggagcaatctgaccccagcacatcactacccagactttagatttaagacatacgctccattagcattccgatatttcagagaactttttggtatcaagcctgatgattacttggtaagaacctgtcatttttcttccttctatagaaatgtgtgatgtaaacatttgtctcatagcaacagcaacaagtggcttgtgtctctcattttataaagctctggggcrtagtaaaagttccaagttttataatgattataaatttagcttcaagaaatttgatgtgactttgtagcttttactgataactgcaaaatctgtggtggtaattgatatttaaataactataatatcagttgtgacttcagataattattctaacagatatgttataattagttctaaatactcctgtgaattttgctgattagattctatttgaaagcctttctatgttaattgccttatttgtaccattcctctcaactaccttggcccacaatcatttcaccttgrcctacaaatttgagtaaacattgtaaagaatctggatagttttgttctcaagatctcttcaggcagactttttaaacatatttttagttggtacaagggcatattttatcctcagatttgtctgtgctcttcatctgccttctggcacacaagaggtacagacacaacagcctttttgtaagaggtagtctgatgtgacctcagagttttacctcattcctgttcaagaagccaggaactttctgttacaagtgaaaaaatggtttgtttcataatttgatcactgttaacaccctgggggctcctcagaattggtttcaaaagactgtaggaagaatgccatcaaatatttattgttcatcccattctgaatgatcttaataagacttgagccagatcctgggataatgcttttcagaggaagtatagcaacacgtgtaacaaagagtgcttaatatgcatcttataatttggataagatgtaaataattaaaagctgattctactctgtgctgatgaagactctcggatgtctcctctgaatcttcttgtaaaggaaaaaagaaaatctgtgaatgatcttctttatttggtccctaagaaaatcatatgacttctgcctaatgaagcaatactgcttcctcaaggcacatcaataagtctccaaagaatggtgagcgcaaggttgaaagtccctagcatactgctgcccttaaatgtatatattactctctttctctcaccactcccctttcatwgaagcctcaggtgcctctacccatcactaccaatgcaagtacacaagcacacgcatttgttctgtgtgtgtgtgtgtgtgtgtgtgtgtgtgtgtgtgtgtgttagagaacaccctttggtttctagccattctgtaattactgagggttgccatcattcaggaaatatatttgagaaacccaatggggttttgatattatattatggaaaacaagatctcttatcttctgccacacactcaaatttaatggattctctttctgaatttccttgaacttctcaccagctgaagagatgccttagacttgcgtttcacactgttgatccagtcaatatgaccagatggatgyctgtctttagccctcccatatccattgccccaaaggctggaagtccattctttcattcatctggacctcacaaatttgctttctttggggaagatccttttctgaacaacttcccacacagcctccccaagtttcctaatgagtctttaagctggaaaaattattttcataatgtggttagagtatttacaaaggagcataagaatctaagctcatcacttctcacaagaaaagtctttgtccctgtacctagcaaaaggtaaattaatcaatcagtggacactttgaacaccaattatatctaaaatgctttgctcatagttgtagggaaattcaaaaaactgcaagtcatgacacacaaagaacttaaaatcaaactggaatactaatttgtctatgtagaaaaccaatcaactctaccaggcaataaatgtaaaaactgaagcaaaacatgaaatactctagggttgaggtaggggtctttctctttgttggggtgatgattaggaggtcttcttatgagcatgatgtggttttaaccatgccttaaaaactacaagggattttaaaaggtagaaaagagatggatgctcagggggtgaagggttggaaggggcactgtagaatcagagatgtggatgtgttcagttttcgaaaggacatttagtggaccaatatggctggaggggagagtttttatcaggaacattattaacattattaagagataggtccaggcaactcaaataaacaagcttctaaattataggaaactaaggaaatataaagattgacaagatatttgatggtgttgagaaataacttttttgtgggataataatatcatggttctattttaaaaggagaatccttgtcttttagaagatatactgaaatatctatggatgaaatggtttgatatctgggatgtacttcaatagtatctgaggagttggtcaaagcatacaaaatktgaattagacagccaggcacggtggctcatgcctgtaatcccagcacctcaggaggccgaggtgggaagatcacttgaggtcaggagtttgagaccagcctagccaacatggtgaaaccccgtctctgctaaaaatacaaaaattagatgggcgtggtggcacatgcctgtaatcccagctactcgggaggctgaggcaggagaatcacttgaacctggaaggcagaggttgcagtgagccaagttcggacctctgtactccagcctgggtgacagagcaagactccatctcaaaaaaataaaaataaaaataaataaaaaacaaaatttgaattagagaggaggaataaatacaggagatctattctacatggtgactataggtaataataatatatacttgaaaattgctaagagagtagattttaaagataaatgcttgaggtgatggatatcccaattactcttatttgatcattacacattgtgtataggtatcaaaatatcacatgtacctctaaaatatgtataactattatatatcatttttttaaaaaagaaaaagttcccaccacaaataaagtgatgaatatgtgaggtaaataatatgttaattagcttaattgagccattccacaatgtatacatgtatcaaaacatcatgttgtataccataaaagtatacaattttatttatcaattcaaaaattaatcggaaggattgtgtactctaaacgggtgaattgaatgctatctgacttacatctcactataactgttaaattgaatgcccccctacaaaaagaaaaatctgagggaagtagggcagcagagtggttggaggtctagaagaaacaagattggccatgagttgatcattgattgatcatgaatgagttgtccatgagttgacgctggaagatagatacatgagtgttaatttcacaattcttttcgcttttatgtacgtaaatataacttaaaaggtagagagaggccaactgtggtggctcacgcctgtaatcccagcacttagggaggccaaggtgggtggatcacctgaggtcaggagttcaagaccagcctggccaacatggcaaaatcccgtctctaccaaaaatacaaaaacgttagctgggcacggtggcatgagcctgtagtcccagctacttggtaggctgaggcaggagaatcacttgtaccccggaggcaaaggttgcagtgagttaagattgtaccactgcactccagcctgggcggcagagcaagactgcatctgaaacacacacacacacacacacacacacacgcatacacacacacacacacacacacacgcatacacacacacacacacaaaatagagggaaagatagagccaggtatgtaagtgtgcttttgtttgattccatttgtccacctccctcattcaccacacacatggttcagtgtctagacacatctctggggcttgcaagaaacagaacaaaggcagtggccttagctaaacataactacctggtccccaacagctgctgccacccacctgtgcctgcactggggacacctgcagcacaggactgaggcagctccccaacaaactttggagtctctggaagctcacctccaaaccgctctatctgggactgcacctaatgatctggagtgtgatagatgaggaaagggtcgtttgcatgacacagcatgcttgagtgtcaggtataataaccttcagcgactttttagctcaatccttcattttacagatgaggaatctgaagctgggatcagcaaagggagatgcccaaggttacacacattggtgggggcagagcctagaccaaacagtggtctccccatccttccccaagagcttgaagacccttcaccagctggcctcatgctttccatatttgatgagaatcacagacctcttaccaaatatgtactcaaactagcctcttcctagcccattgacctgtgattgtccattctgaagaatacagctgaaagaagtcaaacacctttaacaaaacacattgtggaagagtttagctaaaggaaagcacagaaataggaaataagacattgcttgaaaaaccctgtgaagaaacaaaggatacagtgccaatcacaaagtgcatcgtggtggctgtcaaactggggctactcaaacccacacttgtaagatacagtgagttaagttggaggtgtgggaacaatctctagccattggtaactccatacttaggtgtgatattgaatacctgcgatatgtgtgtatttctacttagctttttgctgttgcatctggattcctgcctgaattactctgtttatgccctccatcccattaaaattcaccctgtgcatgctgattacaagtttcatgttgaaacatgcataatttggattgtgagacagtatggtgaaggggcttctgtacatacagcagtgcaaactttccttcttccttattcctagacaaacacctcccaaggcaaagccaaagggccccagagcattcccatctctgcttgggcaaccagctatgggttctttccttctccatcatgtgcctggatattcaaaaatccagtagaacttatatgagtcttttcaggctcacctgcgccaataagaaagagagcagagtgaatatttcatactatcgggggaagaaatggcacataaaattatctccaccacatggggcaagtttacattgttaatttacactggcagggcccagctgggttgtgctctgctttttctttttctccagtgaatatagcagggagaccctgcaggaaatagaagcaagagcatgaatacattagaacagcttgcacagatgacaagtgcctggaaggtgcataaaacccaggagcacacatgggggcttttgatcatgactaattaaaatgttcccatctctcctcttcatttgctcttaagaggcaatgttgcaaagaaggtggcttagaagagaatgtggtaaccaagttgtagagtgagaaaccatagaattctacagcataatggtgatactcctgttcagtatcataatcacagtttattgcacattgatgctagtctatgaatagcccccaaagggttattaaagtggatcaaaacaatttattatttcattcrtgttatgtataaatgacataataaaagaatatttgacaatgtagtaaccaatgaaatagtcttcatattatgtcactgcatttttttttaatgtcactgcttatagaagaattggagactttaattgggagcagatgttcaggtctgratccagtttyttctagacacctctttccggatcaccccctaatttctcaatttgcarcctctaatttctgcatcctttgttgttttcatattttcacaacataaactcctacccataaggaagttctgtgtcaggaattcaaatgccatggaacaaagaatccaaattcctaaagagagtctagggtctgcctttactttttatgagagcttggagtccacacctttatattccagggtcccaaattcgtgagtaaatgagaaacccaacattttcttgcttcactcagaatgttttagtgtctctttggatcaccctgaagtcatgggcagtaggctgagaacctcagtgtatcctagggtggtatcagctcttccttacctgcctgtggaatgagtatattgtaggccgtgtgcttctctcacctgtgtgtgatcatgtcataaaattaacaacagcaatacatggtcactctttgccagggttttcaaaagcattcactttaaaaacttccagtgactttccagtagatattattacctttattttagaaatgaaacttctaaaactccaagatgctaaattccttactcagaatcacataactagcaactgatacaaatctcacgcccttttcacaaatcgctcttccacaaggacactttgtctgcacacatggctgggcaagtgctctctgattcctctcggtttttatggtgtcctgtctgcagtctgatagctatttttgttttcctaacttatcctcaactcatctgtaggcttaggctctaatgctgtttagcaagagattgtcaagaagcaaggctaacagaaagaaggggaagtggacgatcaaagttgccaatgacttaggaagccagcagacacttgcttctttcttttctgggataattttgtttcctttatcctcagtattttcaaagcaaaataatgtaaaagatgtatctagaagctaccttttaatcatgtttctgctagtttctctctccctcctctccctttttctttcagtctccctcctttcaggtttttctatgatagggacttaaatattcacaagctcagaacaaaaattgtgggatttttagccttgatgttttttcagatgcctacatcctcaagatatggctgtttatattacagagctgtagtatcaaaacagcatggtactagtataaaaacagacacattgaccaaataggatagagagcccagaaataaacacacacacacacacacacacaccctatagtcaatagacttttgacagaagtggcaaccacacacaatggggaaaggatagtctctttaagaaatgatgttgggaaaactggccatccatattcagaagaatgaaattggacccttacctcacatcataaacaagaatcatctcaaaatggattaaagtcttaaatggaaggccagaaactgtaaaactactagaagaacacataggggaaaattgcgcagtattgatttgggcagtgatttcctgaatgcaaccccaaaagcacaggcaaaaaagtaaaaatagatcaaaagggttgcatcaaactaaaaagcttctgcactacaaaggaaacaacagagtgaagagacaatctacagattgggtaaaaatatttgcaaataacgcatcaggtaaagggttgatatccaaaataaataaggaactcaaactactcaataacaagaaaactaataaccctatttaaaaatgagcaaaggacctaactatacattcctcaaaaaaaaaaaaaaaaagatacacaggccaagcatggtggctcacccctgtagtcccagcactttggaaggctgtagcaggtggattgcttagcccagaagtttgagactaggctgggcaacatggcaaaaacccatctctacaaaaacacaaaaaaattattcgggcatggtggcacgttcctgtggtcccagctactcaggaggctgaggtgagaggatcaccagagcctggggaggtcgaggctacaataagctgtgatcagcccactgcactttagcctgggtggcagagcaggaccttgtctttaaaaaaaaaaaaaaaaagacatacagatggccagtagatacattaaaaaatggtcaacattcttaatcatgagagaaaaccacaatgaaatatcacctcatacctgttagaatggctgttatcaaaaaagataaaagataacaagtgtttggtgaggatgtggagcaaagggaactcttgtatactgttggtgggaatgtaaattcatacaaccattttggaaaacagtagggaggttcctcaaatagctaaaaatagagctaccatatgatccaacaaccccaccactgggtatctatccaaagcaacggaaatcagtatggcgaagagatgtctgcactcccatgtccactgcagcattattcaaaatgggaaagatggaagcaacataaatgcccatcaaaggacaaatggatttttttaatgtgatgtatatacacaatggaatactgttcagcctttaaaaacaacaaaattctgtcatttagaacagcatggatgatcatagagaacaatgtgctaactgaaaggagccaggcacagaaagataaatatcacatgatctcacttacttgtggaatctagaaaaatcgaactcattgaagtagaggagaatgatgattactagaggctgaggtggtagtgggtggatagagaatagggaaaatgttggcgaatggatatgaagtctgctggatggaacaaatcagctctggtgatccattgtacagcgaggtgaacacagttaatgtatatctttctaaattaatttaaaaagtggattttaaatattctcaccacaaggaagtgtgtatggtgatggatatgttagccatcctgatttgttagccattctacaatgtattcatgatcaaaacatcacatacccaatacatatatacaattattatatctcatagaaaaacaaatactgcatgttctcacttctaagtgggagctaagctatgggtatgcaaaggcatgcagagtggtataatggacattgaagacttagaagagggagggtgggcaggggatggggaatgacaaactgcctattgggtacaatgtccactactcaggtgatgggtgcattaaaatcccaggctccaccactatacaattaatccatgtaatcagaaaccacttgtacccctaaagctattgaaataaaaaaactaaaattaaacaaatcattatttgtcgatcgaaaatttaaaaatagaaaaatttggccaggtgcggtggctcacgcctgtaatcccagcactttgggagggcgaggccggcggatcatgaggtcaggagatcgagaccatcctagctaatgcggtgaaaccccatctctactaaaaatacaaaaaattagctgggcatgtagtgggcgcctgtatcccagctactcgggaggctgaggcaggagaagggtgtgaacccgggaggcggagcttgcagtgagccgagattgtaccactgcactccagcctgggtgtcagagcgagactccgtctgaaaaaaaaaaaagaaaaatttaaagatgatgtggttctttaagcccctgcttctgccaggctgggtctgtctcacacctgcatggcctccttatctttttctctgccacccagtgtttctctagtcaattatgtagcttattaattaataaacactgagcttaataaaaccaaaaacagacttctttgctggttttagcattttttggtgacatttacagccatacaattattggtggagttcagccatctgacggaaatttcttgagtaccaaccatgtatgtaggcacctaccatgttccaaggcacaggtcctggaactgtatcacagtgtaagatagtcacagtttctgctgcaccgagttttacagtctctgcaactcgaggaaaaggaaacaggcaattgcaggattttgtggtgacttctgtgatgagaacatccagggccaggaagcaattgatcttttatccgcggaaccaggaagagttttccagagcaagtgctgcctcagcaggcactgaaagctgaagctgtggcaacagtctatgaattatgctccctacatcttccccttgtccttctacggtggtttcctaacccaacagagtggtcctctgctccagaccctccaatggcttttcggcccccttagagaaaacaacaaagtccttccagtggcctatagcactggatgtggtctgtccccttgacctctctggctccatccctttcagggctcctccttgccctctctgctacagccactggcctctgctgtgccttgagcccaccacatctcaggcctttgcattttctcttccctctgcctgaagtgcccgttccccagatagccatgtggcttgctgcctggtctcaacctctgctccaatgtcacctttgcaaggaggccttcagtgaccaccctatttagaatttactgcaactcattcctcactctttgctggtattctctgctgctttttccatgatccatttttttctccactgcacttaccactttctgatgtgtaatgtatttacttgtttactgtctgtttcctcctactgggatataaactttatgagtgcctgggacatagcagatgctcaatagttattttttaaatacagcaatgagtggtaggcaggtgaaagtagaagggaggttgtcgcaggcacaggaaaacacaaaagcctggctgttgagagtatgcagcacttttaagaacatgagaagttagtctctgtggctagagctaaagttgaaggaggaagtcatgagagagaaggctggggaggaggctgggtcattcatggccttggaagctctgttaagaaccattgatttttagatctcacaaataagtgagaacatgcaatgtttgtctttctgcaaaagatgtgaaagcccagaaaaacatgaagagatttgcattttagaaagatgcctagtttcctggtgaatgtactagaggggatgagagtggacaattaagaccagaagcttgccataacaatccaggcatgaaatgatgaaacctttgaactaagggtgttggcagaggcgggcaggcagcatcaacagtctggttaggaaagatgaggaaatgtgaggaatcaaggatgatgccctagtttctggtttggggaataaggcaaataatgcttccattctctaagggaaaaggcagagaacagggggcagatgatctagggtcaccatatgcagttgtgcaggctgtgcactgctcaagctctcctacctggccgaggggaaggagtggagactggaatccagcctttttttttttttttttgagcagagtctcgctctgtcgcccaggctggagtgcaatggtgtgatcttgactcactgcaacctccacctcccaggttcaagcaattcttctgcctcagcctcccgagtagccgggactacaggcacgtgccaccacgcccggccaattttttgtattttttgtagagacaggatttcaccatgttagccaggatggtctcgatctcctgacctcgtcatccacccgcctcagcctcccaaagtgctggaattacaggcgtgagccaccacgcctggccccagcctttcttctactcaccaactttgtatcctagcccagagctgcatctaccaagataaaaagttgcatctttctaattaccacaaaggcaccatgtgggctaaccacagccttgagatgaacttgattgtgaacttattgcatataaattgtgtgtggtataaccaaaatagaaatgtctattaaagtgttagatgaacaggtcttgagccctagcgaaagatctgggctagagatacagatgttgaagtcatctccttgttgaaaccatgagtagatgacatcttctgggaaaatcatgaaaagagaatagggttggtgttcaagtgataaaacacagtgcagttcacatcttcacttgttattttatggacatttgctggaaacaaagcaccttagtcaacacaactgtttgaattatctcattggactgataggatgattcatgattctatcgcatgactctgggggttaggagtgtatgtctgtttttcatcatagaattattaagataaacagaccaattaaatctttagaaatctcaaaaagagccttctcggtatacgtggagcctcttttaaagcccgtagagaggcttcttgtttcaacatagctaagatgtgcaatgctatgattgtcctccttggaggcatcacgtacatcaagtatatgttttaatgtttattcatttacccttttagtattccatctgcagtgaacctctaatagaactgtctaaccctggagccagtggatccttgttttttgtgaccagtgatgatgaatttatcatcaaaacagttcagcacaaagaagctgagtttcttcagaagctactgccaggctattacatggtaaggaactgcacatcattaatgcttctacttgaagtttaattactttcctcaacagtttttttctgttgtttttttcagtgactcaggcatgtttctttctctttggtaagctttattctgcatttaaattatgctatgacattcattgaatagattttttaaagtaaactagaactgaatggcagagcatacttgttgaatcccacaatcctgagttcaaatcccagctcagccaataattaactgtgtgaccctgagtaagcagcataactggtcagccttagttccctcagtctttaaaggctgagaaatacgtggccaggcgtggtggctcacgcctgtaatcccagcactttgggaggccgaggcaggcagatcacaaggtcaggagattaagaccatcctggctaacacagtgaaaccccgtctctactaaaaatacaaaaaaattagccaggcgtggtggtgggcgcctgtagtcctagctactcaggaggctgaggcaggagaatggcatgaacccgggaggcggagcttgcagtgaatcgagatcccgccactgcactccagcctgggcgacagagcgagactccttctcaaaaaaaaaaaaaaaaaaaagctgggaaatacttatcttacatagttgttgtgataaagtaaggatacaggatataaaataaaggaaagataaaggaagcaatgtgtttcaaagctctttgcagccagtacgcagtaatagtataaatggttaactttcatggattgcttactacatgttaagcaaggccttaagtgctttgcattcattaactcatttaatcctcacagcaaccttggatactacaattatcacctttttatagaagaggtaattgaggcaaagataaattaagtaacttgccatgggtgattcagctggagagctgcagagctggggctacgcaagcaaaagggctccagagaatgcatttttaacccctacactaatacaccggaacatattctatattagctgttctcagctactagacttcagaatttagaatttcatgggtaaatgtgatagtgtgaaaaatcacctttcatgtaatattttagagacaaaggaacagtaacttagcctagacggatttactacacgtttactccaaaattttcaaaactatccccactgttcctaaatagtccaggcattttcatacctccagtttcattgtactttgataacagttcttaattttctatgattggaagggctacatgaagctgtctggatttcagaagcccaagttctgccaatcacttgctatgagtggtgataaatatcatctttgtttttaaaaatgcattcatcagatgccatgttatctttttatgtaaaaatattattttaattccaaaatctgctagacacagcattaaatacttaaattaatctcatatagaagtataaaaataaaaaatctcaataaaaatcttagtggcatgcaggcagattttaaaatatttcaatactgagcaattatttttttttggaggaacagaaaatatagaaaagccaaaaaaaaaaaaactaactatagtttctttcccagagatacatattactaaaatatggtgtatatgctttcagttattctttgttcatgcacacattttaaaattatctaaaattaggatcaaattgatataatattatttgataacctgcttaattagtaaatcttaaaattccatagttctgagctcagatatacttgtcctcttgtaaaactgcattggccatatttgactacttatatttaattaaaattagataaaaagttaagggccaggaatggtggctcacacctgtaatcccagcactttgggaggccaaggtgggtggatcacttgagcccaggtgttcaagtccagcctgggcaacatggtgaaaccccatctctacaaaaaaataaaaaattatccaggcatggtggcacgcacctgtggtcccagctacttgggaggctgagaagtgggaggaccacttgagcctggaaggttgaggctgcagtgaactatgatcaagccactgtactccagcctgggagacagagcaaaaccctgtatcaaagaaaaattaaatttagctgaacaagtgattttatcccaattatgtaagctagtataacaatataatccaccccattaacaagaaaaaatgtgaacgtcacgtggttacccaaatagatgttgaggagaagctaaggccctcaaaattcaacatcttcacttaattaaaattctaaaaattggcaggggagtttttttttttttaaaaaatgataaataaatcaatgattatacaagttgtacatttatcagtcttccaaaagttcacatgatagctcatggaaaaatacaggaatcctttctctagaaacaataggaatagaccagagtgcccctcccatcaatagtcctttctgataaatttgctagaaattctggcactgagtcttgagtacaaaaagaaatagaaaaaagtacaagcactgttctctttaaatgacagaattcaaaatgagcaaaccttcattttgctcatgaaagtaaatcaggaatttttagaagtgatatgactccagcagatttgcaggataaaaggtaaatctacaaaatccattatattccattatatagatgatatagagtgggagaatataagggaaaaaagagatcctgttcatgatgacaacaacttataatgaaccctattagaaaaataagtaaataaagtcatgtgagtactgtaattctgattgggaaagcaagatatagtaagtggaaaacataaacaatcagttcagaaagaatgtaataagaaaaattctaaaatacttgaatctataaaaacaaatgttacaagaccaatatgaaggaaactacaaaacgttattgaaggacataaagaagatctgaaataatgaagaaatctgcattgttcctgaactcagtattgtaaagatttcaactgctcccaaatcaacttataaatccagtctaattccaagcaaaaattctaataggatttttcacatagcttgacaaagccaatttctttgaaagtgagagcaagtctcatttgaagaatgttttttaaaatgaacaatcacacagaaagattgtaagaatggagaaaacatttttgaaaaagaagaaaaatagtaggcctgctatagcatatacaaaaaatatataaggctgtaactaatgttaaggatgtaggatgagtacagttttagacagataaattaatggattcaaataaagtgtccagaaatagatctatgtgaatttgtctacttactgtattgacatggagggatttaaactcaattggaaaatgtcagactgttcaataagtatccatttgaggaaaaaattaaattctctatttcagatctttcacatacacacaaaattaattccatatggagtaaagaccaaatgtaatgaccaaaactattaaaaatttggaagaaaataaaagtttatgactttgggatataaaaaagctttgttaaacaaaaagcaaaaagcaaacacacacacacacaaataagaaacaagtaaataaacatgaccgcatcaaaaggcaacacatttaggccaagtgcagtggctcatgcctgtaatcccagcactttgggaggccaaggcaggaggatcacttgaggtcaggagttcgagaccagcctggccgacatatagtgaaaccctgtctctactaagaatacaaaaattatctgggtgtggcggcacacacctgtagtcccagctacttgggaagctgaggaaggggaatcacttgaacctgggaggcggaggttgcagtgagccgagatcatgccactgcactccagtctgggtgacagagtaagactccgtctctcaaaaaattaaaaaaaaaaatttaaggcaacacatttatataaccaaaaataccagacacaaaattaatataagcaccttgaatatttctggaatgaaataaagtgagagcagtggttttctcaaatgttgagaattgggggaagaatcaaggatagcagagacacttttcattgactacatgccgttttgtaaactattttaatttcttatctactttaaaagagaacaaaagtaggcatgtattccctattttttttctttttttttttttttttttgagacagagtctcgctctgtcaccccggctggagtgcagtggcatgatctcggcttagtgcaacctctgcctgccgggttaaagcaattctcctgcctcagcctcccgagtagctgggattacaggcatgcgccaccaggccaggctaattttttaatttttagtagagacagggtttcaccatgctagccaggctggtctcgaactcctgacctcgtgatccacccgccttggcctcccaaagtgctgggattacaggcgtgagccacagtgcccagcctccctgtttttttaaataataaaaaagacaacagactagaagaaactaccccatatagatgagagaaatgataaatatccagagtatatcaagaatttcaacagtgacaaaaacctgcagaaaaaaatgagcaaaattatctttaaggtgactaaaaatacataagtaatcaatggcattcaaatttttaaaaacaggtttctatttttcactaatcatgcttacaaagattttaaagtttgggtactattcagccctggtaagagtaatgggaaaatctatgtacagtcttacatagtgtggttgtaaattggtctgccattttggaagacagttttgcaggagctattaaaattttaaatgttcatccctcataccttggcaattcgttttctctttggctaccttagagaatagtcactcatggcaccagtcaattccttgcctgtttttagttggagccaatttgggacattatgtccaatccagtcactttcactgccctgagtttagaataataaaattgctgtccagtaagcagacttaagaaatagattagaaacagcaaaattttagtaatgaacattaataaagataatcacatcccatttttaattattatatcagcatgaaaacacatctttagtggagcattattttgtcaaaatagaagattgtaaatatatttttctttttttggtttctagaatttaaaccagaatccaaggactcttttgccaaaattttacggactgtattgtatgcaatcaggaggcattaatatcaggattgtggtgatgaacaacgttttgccacgctccatgagaatgcactttacatatgacttgaaaggctcaacgtataagcgaagagcatcccgtaaagagagagagaaatccaaccccacatttaaggacttagatttcctgcaagacatgcacgaagggttgtattttgatacggaaacatacaacgcgcttatgaaaacacttcagagagactgccgggtaaggaagtttgattgttgtgatttcctttgaactctgtgctcntgtaaactgtggctgccacttattgaaagcatagaaataaggaatgtccaaagtggcagacatgtggaatcctatctttcccaatcctggcgctgagccatgcttccctgatattgaaggaattggtagatgataagggagttatctagagtccttaacctacatctctgttgattttactaataagctaagtcagctttctttgataaaatgaaacaagaaagctttgttttcttttctttctccgctgtggggaagatagtttaactagaaagaaatagaatttaggtttaatgtggtgttgagtaagaaaagccgtatagaaatcttggaagaagtaagactcgaactggggagacaagtttaaagaaaatgtacttgggattaataatggctccctagagatcagtgtggatgcaaaactatgatatgagcagcacgtttgctgaaattattttatgtggtctgaataagaggtgagcaggaatgaagcttgccaattagggcagacaccattccatgcaaasttagctggagtgattgtcsaaagtggggaggaattcccccaggctgcaatgctttaaaaaaaaaaaaaaaaaaaaactaagggaagattttttctaacatggtgaaaagagataaaaatttttttagagaaaagaaaaatgcagtgctaataacttctgaaggataataatcatgggagaaccgtccagccacttggctaagttgggtagtggaggtgggcagaaagcatgatggcacaggctgtggttttctgcactttccatgggcctggacggatgacccatgttgttataggggaggggagacacttctctgccagacccaaactcacgtgaaggtgaggaagactgtctgacaccccttctaaggtataaagtagggaatttccactaaggaacacaggtctactgtttctgtttttttttttttatttcttcctttctgcctgttatagcttgcatgattgtgcacaaaaatgtgtccttagaattgtttttctttattgacagagatgttactcctattgtttagctaccgtttattgaatgcttacagtatgccaggttagtctaaggtttttttaatgcatcatttcacttaattctctcagcaattctttgaagtcagtactattcatacttccattttaattgctgaagaattgggttcttaaagagattcagaaacttatccagcattacttaccaagtcaatgacagagcccacatctgtttgggtacaaaggcatgtgcttctaacaactaaaacttaaagtctcactctgaggatttttttttaattatcttttcagaagtcagggaaggagcagtaggaaccaagcaaacagacgaacaaaaaacgtccagcagatattcagatatctgagtggatttgagtgatgcatgtttttctattcaaaaaacgtaaaaacagaacacacatattttagtagaaatctttttcctgtgttttttctgccctttacaggatgtgggtaaaaagtgactctcaattccccagagtttagtgtcagcctctccagttttaagtttgctttctcttttgtgtgcttcttgcctctttagtatggaaagcctttatctgctgccttctaataccacatgcttctctgccagaaaaaaaaaaaaaagcaaatgtaaaagagccattgctcaggatttgtctatttattagtgtttcctgagctcaggactgagaccgcgaggtcaaaccaaacttttcatcacaagtgagaccctggagatttgcctttttattttttattctttggcaggtttgttgttctaaggaacataaaggtcaaggtagaggtatcctgaggctaactccctcttactcactgcatttgcagttgtacaagacacagatcctggacattcttcaaaatatgtacatctgccttcagaaaggcttctcttgggctggtatgggagtgtgtaaatgctgagctgtaggggaactcagctcccttccctgatctgtcctgaccatgaccaagtcctctgggatctggattcaacagctggtgctctgagcagagctgcctcaaggaaagcctatttctggaatggtgaatattaatatttaatagtcaagggcctcttagtaaatcgtatgaatgctgtgaactctcctccccccaaaaaatgcccatcctcgtgatggatcgtgaatctcttggagcccgttgttccttcccttccttcttccccaaggctcagaatccccttcctagagttacctctctctctcttcaggtcatcctctgaaaggccaactcactggatgattgcaataggatatgtggttgacatcgccccaatattgcccttgctttgcagagctgagcctcagtgctggctgaggggctgcagagacccagagggtctgcaaggttagtctgagctgaggccagcacctatcaatcaggaatctcctctgctaaaattcctgtgagacagtatggctaaggctctagaaacaaaccagttagagaaatgtattactgtatcagcaccccaggcagagaaaggtgaactaaacctatattaggatatatgcttctattcacttatcagcacatattgcaagcacactacatgccaagcatgaggtgcacgacctttattttttatcaattgccatacagtctagtatgtgcaatgatattatattgtgaagattagagtagggaacattgtagcttgcttttaaaggatgagaagctttctccggataggcaaagcagtagaagcatatttctaggataagagaacaataggtatgaaacaatgggtgtgaaatagcacaatgtgttccgggagctatagttgtttggttttggggcagttaatagggagagcatgtggggtagaagaggaaagtggccacataatatgagagccacatattgtcagaagaccctttctggtggtgccagggagctcttaaggacttagcagtagcaaatccaagaatcccagacctttggaccccagcttctttgttgttcccagatggatttgttaagcctcttaacctatggctgacctccccctgcttcttggcgcccccacctctcctttcatattttggcttgacatctcagaccctggaattctatttcctttagcatgagtgctggccggaagggccagcttgacctagcttattsccygctccccatggactgcttccctgactgccaatcagagctgccgtttctgagctctgcgtctgaaaagacctgaacagcctcatcctgcactgagtcctcctgacacataccatcttctcctggcatccttgtggcagcccctgagtccctttgcctggcttycccaagcccagtcccagacccctgtgtataataagcctgccctttgggatggttcattcctgaccaactcctccatgtagcacattggccacttggaactattctagaaaactgatcttcttttatgcctcaaccctgctgagcccaattcccccacaggatcagagggctctttccaaaagcaggcatccagatgtcaggttctgcaccccatctccacattgctattccccattggctgtgtgtggtgggggagaaatggatatgtaaatgatgagwcccctttcttgaaggctttcctatcccttggcctgaccctctatatgctcactgccacagccatccatacccacaagttaatttgagccaaggaaagagtggtgacattgagtactacaaagacatcacagatcacttgctatcaaaaccagaaagcaggatttattcaaaccatccccaatggctcccacgtgacagacaagctgagatgcgtgtcctatttgaaaactgctcatcccaggtaccccttcatcttccgccaggcctgcacctcttctagtcttctgtgacccagggaacatgaccatcgtgcagccagatacccagatctgcaccctgaagctactccttcctccctcctctccctctttccctgcatgcagtaaaatcaccatgtcccagtctgcctaccaaataactcatggctctgccccctcctcactgtaggcacagccactgcttttattgagaccgtggttattcatcacctggagttttgctgtagcctctttgctggttttcattatcattgccttccatcacatccccaccactgctgccagactgatcctctgatcagaagacttaacactctctggccaaggttccccactgcttttgggcgaaagccagtgattcccagcttggaacattaatatccttcctgatctggtccctgctacattctccagatgcgttcttcagcttctgtctccagccttctctctcccctctcctctgatacagatccccactctccagctcttctaatctactggccacattctctaaaggttttggtttttttatgcatgcctcactctgctggaccgttcttcccctcttctacacctggccctcacctgctcgtctcaggactactcagggatcagttcctccaagaccgtgctgttgtggttccccatgcatcctgggcttacttctttcatgggacttaatacactgttactttttcacatgtaaatcctggagcctgaggagcaaggcttaatctatctttatatctacatgcctggttcttagtaggtacttagtaagtgtttattggaatatgtatttgaacagaggaataatcagctgtctaatgatttaaaaaaaagagaaagaaaggtttaggtaagaaacctgtctttggtgatttttgtgtatctagctattttttaagttctgcctattttggaggaagtatccagtttcactgcaatgcctgccaaaaattgcactgagaatttaataaagtagattatctccattttgartcacttgggattatttgaaaagttgtactggttgtcctcctatcaagagtcatttgtgtaacaaaagtacatttatattgcagtgagttttcccatggaagcartgttgtaaatggtcattagactttttttctttccaacttttattttaagttcaggggtacatgagcagatttgttacatgggtaaattgtcatgagggtttggtgtacagattatttcatcactcaggtaataagcatagtacctaataggtaaattttccatctttctaccctcctcctcccgccctccaccctcargtaggcccttgtgtctgtcattttctactttatgttcacatgtgctcaatgtgcaactcccatttagaagtaagaacatgcaatatttggttttctgttactaggttaattcacttagaataatggtcttcacctccatccatgttgctgcaaaggacatgatttcattctttttatggctacatagtattctgtgttgcgtatgtaccatattttcattatccagtccactgttgatgggcatctaggttgattctatgtctttgctattgtgaatatggactttattttattagcactgacccctgtcttctttaggtgtatgtactgtctctccagcgagactttaaatgtctcaaagggcaaagctcattctttacacctctctgcagctgcagcacctggcttaytctatacactcagtacatgttgcaagattgtgattgaaaactcttttgaattgaaaatgtatatattaattttaaaagaacaattaggatctatttttgtattcattgtaatttaccatgattattttttctctgatataagttatctatgtaaaatctagaatcccatatcatttaattaatttgataaatttttatatgctgaaatatttattaataactctgggaaatgactttgagacaaagtatattagtgagaacttgtgtttacaacccaaatatttttaatccttcaagtgagagtcatttcagagacagtcttgataattaatgacctaatgacttattttacatttattataatttttgttgagccgcatgttattaatttttaaagagtgtggaaccaattttcttttttcacacaaatgactgtaaccataaatattaataggttctcagaatttaatgaaaccagtctcaagaatactgaaactttctgatgtgcaaagaagggtctttctatgtaaggcaagttctgaatttatgaatcagattcttaacagctatgggcatgtttgcatgggttacaaaatgggttattttatataatatttaacattatggctattgcttaccattcagctataattttgctggtagtaaactttttacattttgttcagacagtttattttctttttttgatattgcttgccttctcagttatcactggggaagaaaaaatgctttagacctaatacaaaggagacgtacatatcctgaaggtagaaatacttcaatttaaattatcctctcatcaataaggaattcgattttgtttttagacttcaatcaaaacatgaaaagggtgcagggacatcattgactccacactcctaaattacttgttttgtttttgtttttgttttttgaaatgaagtctcactctgctgcccaggctatagtgtagtgcataatctcggctcactgcaacctctacctcccaggctcaagggattctcctgcctcagccttccaagtagctgggactaccggtgtggaccaccacaccccgctagtttttatatttttagtagagataaggtttcaccatgttggccaggctggtctcgaactcctgatctcaaatgatcctcctgcctcagcctcctaaagtgctgggattacaggtgtgaagcaccatgcccagccaaatccactgtctttcaaagtgtgttttacaaacactgtaaacccatgagatatttgatttgctccattgtcttaaaattatgagttttggctatctgtaatagtttgatatcatagcagtataagcataaagcaaagttaaagttggtgaacaaataaaaccaactcatagaatcaaagattgttcgagttggaaggaatcctaagagttcctaagaaacagtaaaagaatgccttctactctctggtcttagaaaaaatgattttggacttacctagccaagccaggttttattgtgagaacagaaataatgatgtcatatcatatatgcaagggctttgtaaatttttctacctgtaaatttttttactttgtattttgagataatagattcacatgccgttggaagcaataacacagagagatatcatacacccttcactcagtttcccccagtggtaatatcttgcacaatcttgcacaaccttagtacagtatcacaatgaggaaattgactttggtacaacctactgacgtttttcagcttttttcagatttcaccagttttacatgcacatgtgtggtgggggaggttctgtgcaattttagacgtacatagatttatataaccaccaccttggtcaagtacagaacagttctttctcaaagatgcctaatggtacccttttatagccacagctacctccttccctcacaactcttcctaatcctgtgcaattaccaatctgttttccatctctgtaattttatcttttcgagaatgctgtataaatggaatcatacagtatataacccctgagattggcttttttttactcagcataatgccattgatattcatccaattattgcctgtatcagtaatgtgctcctttttattgctgagtgatatttcttggtatggatgtatcacagtttataacattcacccgctgatgaacatgtgggttttttctagtttttgagtgttacaaataaagctgctgtgaacatttgtatactggcttttgcgtgagcacaggttttcatttctctgagataaatgcctgaattcaatttctatgtcatatggtaagtgcgtgttgaattttttaagaaactgccatactcttttccagagtggttgcaccattttacatttccaccagcagtggatgaatgatccatttttctccttttcctcactagcatctgctgttgtcactattttttattttagccactctggtaagtgtgtatttaagtctcttgctaaaaaattacttgagtatatgccccagaaaagctaaagataaatctaataaagcagtttggggatatagaaaagagtggtgaaaagaaagcggaaaaactcagtggttaagtttagtgcctggtgatatgcctgtgagactatgcaactgacaagattcctaagaaaaggcctgcgatacaggagtttaacgtgtgtgtttctaataataagcactcctgtgagacttcatctaaatctattctacagccattggtgttgcttcattatattgtaattacttgattacatgtttaacgtttgctactaaaaatctgctctgtgggaactgtggaacctcattttcccagtcttagctcactcgagagttcttacacagcatttctcttggtgtcaatcttctgatgaagcctaggaaatagcaacagcaaacattcttggaatagtgaatcttacctagtcaatgcacataataaaagcaggttttagtaataacctacacatggtttgtctggaaagaaccaaggtaaatcatgtcaacattgtgaatttgtggattaattgtttggagtacatttgtattgctcatttgtccaaggtctgttaaaggccagtgaattactaaattgcaactgtgttgacctcttcatcctctcagtttttatttaggtggcaactggtgtcgccattgaagaccatccatacaccacaactgttcagtagtcttgggagggggctggtgtttgtctaggcttttgccgcttgctgcagcttagttctgctgaaagtagggaatggaaatgagctgctggcagcaacagaaggaacacaataatccatgcaagatagtgtcagggtagctacaaaaatcaaaataactctatgctgttgttcatgcctgactttctactaagtaagacaattcccaaattttacagaatatgctcttctgggttttggtggagagagggttccatcttggatataacctatagataccaaagtaacttaacatgtaaaacaaatcatatgtaatatgtaatcatcaaatacgtatatacaatacaatacataatactttattgcatggacaataaggatgcatttccaaggcttactttatctgtgggttggttcaggtaacatttatttaaactttgagccagacaatctattacatataggttctctcattcatcttcacaacagccatgtgaagtgagtggtatgattaccttttgacagataaagaagtgaatcctcaggagaggttcagcttccgcaggtccacagagctcacagtgctgcatccagaatttatacccaggtctctctgactccaaacccatgttctttcatcattacactctccttaaggagcttgtgtrtaatggtggtaaggccactgaaatgaaaacattaagtaataacatggacagatataggcagcatgggctagaagtgctcaatgactggtcacctaactctgacaaggagatacaggggcagatgctgtaggagtcaggaaagggctcaatcctagtggagagcttggtttggacaggacaatgagttcatgaaatcttgcagcctatttcaaggaaggaacacagtgccaagtgactaaggaacacaaagtaaaataaataatccaaacatttaattttaaaartttaatgaaaagcataatcaagcccattgacatttgccaactgttaccaaygtgcatgcacaygaaatcctattaagttaaaagcgaggcttccttctgagcaatgcagcggttacaggggggttgattgtttttgaaatcttgcaggggaggagattagggactcaatgtgtgacgttgaatcctgtgtgagcagcttttgagaattctgattcactacagaaacggaaggattatcaagtcagtagtttgcttttttttttttttaaactctcactgcaaaccaaagtattatcaaaatttctatagaaagaatgaaaatgggaaactgaaggtaatttcctcggctctaagaaataaactccttttcctttcttcctaaaagagatattacctaaagattggagagttgaagcatttcctgagtttgttgttatgtgtctagcaagttttcattttaagtaacttgtcccacagaaatttatatatgcaataattcaagttaaggagagctaaaatctttgggcttatgaaatagaacaatgttatatctactacttagagtttctggcttttttgtaaaaagaacctactggtctctgattagatgaccctaagtgtaggagtaaggtcaatataggccccaagcrgaaagacccacaaagtatttgggggagggagcaaagggaaggaaatgcccccaaggacccctcttctcctccctgttgagaatcctgggagtgcagagaggaaagctatggcaggaaggggaagtggccacacggggcctgatggtagcaactctggctttgaagatgtatctggaaaggctttgaggttggctgctgtggatctggttgtggattctgacgtaagccagtcatacagatcatgatgcaaaacagggcagagttgccaacagccaatccaaaagagatgttaggggcagcaaaccctggtgatttacaaaatggaattgaggctccataccttgggaggaacttctggaagctagtgagggactgagttacagagatttaaggcatatttgagagtttccaaggtctaggaaaatattacaaagtttaaaaaatggttcagaaatgtgccttgtgatacattacccagtgcattgtgtacctgtcagacatgaccttgtcttcctcccagaagctttcaacttaggcttaaagaataaagagtaaaatcagtttgattttatagggcttaattttattcattcaacatccagggcacatttatggagtaccgatggtgctgtaggaccagggcctgcacgattaccttgtgaaaagtaaagtactttggacatccagtggttctgaacctttcagaaaagatcaccccatactggcttctgagaggtttggggccacgtatatggctcttcatccctgtcagtatcagtccacactctttacatgcccttctaccctgcaactgagtgtccctttgatatcaccagtgttcttccttcaaagacatttttcaatttagtgtttttttaaattttgagacagagtctcattctgttgcccaggctggagcttggtggcatgctcatggctcacttgcaaccttctctcctgggctcaagcgatcctcccaacttagcctcacaagtagctgggactacaagcacatgccaccacacttggctaatttttgtattttttgtagagaaaggatttcaccatgttgcctaatttggtctggaactcctgggctcaagcaatccacctgccttggcctgccaaagtgctgggattacaggtgtgagccgctgtactcggccaaatttagtgttttgatcgagcaaggataactcttctctcctcatttttgtcccttcaaatactgcatttctaagtgacaaggtagaaaatgtccgtggggggaatgtctccctccatgagaatgaaatggccaaggacaatctgttattcatgaattgatatataacattcaacttttcataaaaaggatacatctgcgaactttctacatgtatacatcagaaatgtgttttaaaagggatatgtacttcactggacagatcaattgtccatagctactcaggctacagagaagttaaaactgaacgtttatttaaaatatcttcatccagccttaatgcgagcctggctggaatgattctacatctcgttaacttcctctcttcatttctccacacaaagacctcatttgtaaactttgcccatattcagccagctccagatgttccaaggacaaaccattatcacgaccaactcagtgtttgctgcattttcataagcacttggtgatctctcttcaaatgatgacgggagttctttagacayagagattctccatcctctgatattcctcattctgaattggctatccaacttttttttctagtttgttagcaatttcagaaaaaggtctacaatcaaattttcaaagaccagaaaaagcagtgattccagattgcagatttactctctgtccactcagatgtgcggggaaaatgtagttacttaattatctatgaatccttttccctactagcatccacttcctcaaactgaaacttatcagttagtaatattgcagtctcttctggtttagacagtcacccctccagttaaatattctgtttattcaaagttgaactctctcagggtaggtgtgaactgtccctgttttatcctccattttttaggtgagcaccattggaaacatagggtccttgtcccatgtggacacacagagctgagaacattgccacaggcctctccatactcacgcattccagctctgccttaactgtcaccttcatgctaagtgtggctttcaactgtgtcatgttgagccactcttgtaccttctttagttttgatcatgtgcatatattaaaataaatatttaaaaaaatattaaaataaatattaaaaagtaaataagactccaaatgatttttttttctaatgataattctcagaacctggattttccatcacttcttttaaaactcactctgtaggtacttgctgttcttagatattgtttctcaataccgatggtgactttcccgggcctcagatttttcctgctctatgaaagcttcaacaatcctagagcatggatcagccagttttctttagccttaaacaaccacaggaatctcagttgataaattctgccttaccttcctgccgaattaattacatgttgttcagcaaacagttccgaattttctctctgtagaaggctctgtgctaagacctgtgggaggtacaaaaaatgaataggatgtagtcctttttctaagaagcttagagtttaaacactaagtctaaaccatcaaggtcttatttatcacggacagattcttccattcttcttctctttctttgtccatagagtaatatgaaaggtgaagggtaagtacttttttctttttaccaagaaaggcagtttaccagagttggtgggctgtagcagacagtggtgagggttccagaattttacctcacacatggacgtggatgtgggtgcttggaccaagtgtggcctctgagtctcacaagacagctggcctatgcctgggctctctgctgacgtaccagttaagccacaatgaagtaaatcattcatagtaaagccaacaagaagatatatcatataatgagaaggatgtgacattttaacataaaatattacttttaaacctgtttacaaaataatttatgaagacatctttatttgaagaaatgaagtgtttataaagaaaacaaaccaaattcatccagcataggaagctggtgaatatatatatatatatacatacacacacacatacacacacattatatatatacatgtatatgaaatctttttaaatgatggatggctatttttaagtgtggaaaaaaaaaaagccttggtacaggttaatccagtacagcccaagttctaaatcacggcatacacaccatgaaaaacacattattgccaaaacaaggatttaatatttatttcattctgctttgccagccaaaattgtatggcttgtcacagcctgtattttctcattatgacattagcaaagaacactgagctttactgaagaaatttaattaaattgaaaagaaagtgtttggctctaactaaactggcacaatacaaggaattctagaactgtattctgaggggtctactttgtgaggaatggcaggcccttggattcatttttccctaaaccagtattttcagaaatgtctatttgcataaaatctccaggacactattttgaattttctgacattattgaattaacaaaaatgtatttgccaatcattaactccttgttcaggaactagattctaggccaactggaaacattactcaggacccttgatacatcttcctgtcagctccacattttgttaatttggttattttgcagatcttccatcaaagattgatcaagtgagatggaacatagcaagttttctgctttaaccactttagttaagatcccaaattattaatttctgtttttttctctgccatctctagctcatcattggcaaagggtaagttaatgctaaacaggtatagacgtgcattttatctaagcatttcaaaatagcacgctaaactttaattttgaaaagtttatacaataaaaatatgtaaaagtagaccaaatattgtaatgaatccacatatactctgtgctctatttttaactcatggccaatctaggtttttttgtttgtttgtttgtttgtttaactgcctctcttcccatataatttgaaacacatccaagacatcacatcattttactcatatgtactttagtaggaatccctaaaagctaaggactctttaaaaaaaaaaaaaactacaataccattataatggattaaaaatattaataattcttactaatcatcaaatgtcagtgttcaaatttctaattgtttcagaaacaactttttgtggtttggatcaggatttaaatagaatctacttgctaagttccttgtcactctgattttttcattttgaaagtatttgttgaagatattggtttgtttatcccagagcatctggattttgctgattacaccacattgtttcatttaacacactcctctcttgtgcgttttttctgtaaatggattgtaggatcctacaggttgagtcagtcagatttaggtctgacttcatatttgatgtctcccctcatcaggaggcacatcatgtcagaatgcctttctttctgcaatgttagtacctgttgatgaccactgattagactcattcattcatcaggagtggtaaaatggggatgttctaattttattatatgtctgctagactgcamaaaggaattttaaacaaaagagtacctgtcacatagtaggtgcgcaataaaatacgtattgaatgggttaatttccataagaacccctatgacaagggagcagaggacaggaaaactaagaaggccttgagatgtgttccatcttagggccagcaccaagcgttcttggatgattaaagagccttcacagttgaccaagcctgtgacatgctgttcttgcaaaggcttcctaaagaaaaatgtgatagtcttactagactcaaagctcagcctaatttatagcaaaacaactttgccttttatctgccatttagctgtatgcctactaaacagtaaatcaaaagaatctctataaatatcagcttgatttttgcccttgacacagtgtatataaaatacctatggtgtgggtaggtttgaaagcactgtaggcttttatctttatttttctgacaacacagagcacataatcacagtaaatgtttttagtgccaaaaatttgttcatgggcattgtaatcatgatgcacaggtatcaagttcttatatttaagatacagggtgtagtgttttacattctttattgctgaatattttggttttcacttacttatacatgtggaaagcagtataacaaatattcattcctactgtgttcagagcacacagcaaaatgcactaagtcaaaccagtctttgttgagaaatgaagtcttgtgtgtatgatacaaagaatataggtgtaacctgaggtagaattttatatgacagagggacactaataatgtgcttgggtcttcagaggggagacatatcccaatagtttgttgaaatcattagtaaatttgcatggagtggggacaggctttgaaaaaacagtaggatttgaaaagatggtaaggaccatctagaagaaacgacatgagcagaagcatcagagtttacatcttcagagcacattcaggggtaaagagctccagttagactagcctggcaaatgtctctaggcaggcattaagtaacaaaaagacattggctagggccatattagtgaggactttctatgtcaaattgaagcactggcaccaagcagtggtgagagactgaaggctttgagtagggatgtgatgtgacctggtcaagcacagatgtcaggaatgggtttgtgaggaaagaatgggaaactgggccaggcatggtggctcacgcctgtaatcccagcactttgggaggctgaggtaggtggatcacttgaggtcaggagttcgagaccagcctgaccaacatggagaaaccttgtctctattaaaaatacaaaattaactggtcatggcggcacacgcctgtaatcccagctacttgggaggctgaggcaggaacattgcttgaacccgggaagcggaggttgcagtgagccgagaacatgccattgcactccagcctgggcaacaagagcaaaactccatctcaaataaaaaaaaaaaaaaaagaatgggaaactgaaattaattcattatcattagagagaaggaacgttttgataatagaagctgcaggattgggtgactcagtgaaggaaaagtagccatgaagtatgaaatcgcattagaatgatttcaagtaaaagagggaagtgaggaaaaagaactgctttggagtgaggtaagaatttagggttatagcatggccatgtgtagacatttagatggtcatggtggctcacgcctgtaatcccagcactttaggaggccgaggtggttggatcgcttgagcccaggagttcaagaccagcctgggcagcaaggcaaaaccccatctccacaaaaaattagtcaggtgtggtggcatgtgcctgtagttccagccactcgggaggctgagatgagaggatcacttgagcccaaaaggtcaaggctgcagtgagtcatgtttgcaccactgcctccagcctgggtgatggagtgagacyctgtttcaaaaaaatatttttttaatttaaaaaagaagtttagagatgttctgaaggaaatatattgggctgcagcttaggaatgaagtcagattaaatgcaacaatttaggaattttctgtagaaagatggtaattggaatctacctttaagaagatctcaaatctatccacttctccctcgagctccccagctgcccctactcattcaagtattaccctctcttacctggactgctgaaataccccccagtcgaaagtaggtacttcctgtgggatcttcccacagctctctgatttttccctccaggccttattacaatgtgtaattcgggcttgtttaatgttgagtatggaataattatctgttgttttatccctgaagatccatcaacttccacagtgcgtggcactcaaacatttttttttccaacaaaagagtcaatgaatgtaagtactagaaagtagaaaaaacagagagctttgggtgaacatctttagggcacaggaagaaaaagtggaaaagtcaaatagacaaagaaccaagagaagccagggcacaatagctaagggagaggggagattcaaggtgggctggtcatagggatcgattctgcaggtggaggaataacatgaatagctgacattaattgagtgctttttgtgtgcctaagacttggcacggattaactcagttaatcttcacagtaactttggtaggaattatttggtaggaatccctattatagagataatacaggtgagaatagataccagaaatgttaaatactttgcccaaaaacaagcaagtgggggagccatgagtcaaaccaggccatctggttccagagcaaggagactgaaccaccctgcagccacaccagctcctgctagcagtaagacagaagatagtttgcagtgtgatgtggtgttaaagatgtaaaagcaaaaggaggaccagctgctctttgtagcctttagtcatgaagagaggatggcaatgcctatgattctgagttaggatatttccacattaggtccccaaatctacagaagttacaggagcactcatgcatcaccagtcatgaaaacctgaggaatatgctctcatttcaagaacaggtagtttttgattgtgtcttcagggtactctagcagctgctttgacattgactttgacattgacttttttactacattccaatgttgttattgacttaaattagtccttgagagagaaggaagaaagaatctgactttggcaatagaaagccttgcagtattccaacttgctttcagttttaaatagttctgtgaatcattcctgtttcctttttttacaagtagggaagtaaagtcctgccagagctagayggaaaggcacctgtatttgcattgtaacctgagttttgaatagtaaatgcacaggtacagaatatactagcaacagtaaggtcaggcagacattctggaaatgtgcacctgagtgatgaactggactaactggtgtctgtcatgttgcagaatgttgctaactcttaaagctcacacatgttaagttgttggcagatttatcaattcttttaattaaaggactgggatgatatgagtaacggaactattttgttcctaattgatgcaaatcttaaaagtacgtgactaaaatctgttcccagagtttctcattacagaagccttttaatttgttttaaaatatatgcatatacatttctctttttgttccttcagatttcttaatcgatggtgatttttcccaacccaaactctaactgcaatggccagctttccacatatggggatagaatttctttttttaagccttccacactgaaagtaggggtcttggcctcacgaggacaactcagcacccttcccagatgctggcaatccaaaagaagagtacagaggagatgaagctctttttaatattttttatcactttttcaaaagttaattctctcttggaatttattctttaaaaaaaaaaatcggaccccttacaggatcaggatagtgtcttactttatccaatagttcagtttggaccacacagcctgactttgtctcacctgtaaaattgcacagttctcttaggcctgttcatgggccgggaaaaaagactgcaagtacaaaacacatggttcaggttgaatattgcaggaaaaatataagaaaaagtatttcatttttaaaaaaatcttcttaacaattaattcatggatgctttgctgaggaaaatgctttgcagaggttgaatattgcatgacaatataaaaaaagcatttttttaaaaaaaacaaaggtttttaacaagcagaattcattcatggatactctgtggaggaaaatcatggtgtccggaatgtttttaagcttgaccactcctaacttgagtaaatgattctgggtgccttttgggaacatccacagtattgtcagagtcttcttaggacctgcttttgaagccagcttactgctttggaggatgctttgggctgtgcagggcagaagactgtgtttttgccaattgaaaattcctggccaggcacagtggctcacgcctgtaatcccagcactttgggaggctgaggcgggcagatcacgaggtcgggagattgagaccttcctggctaacatggtgaaaccccgtctctactaaaaatacaaaaaattagcaaggcgtggtggcaggcgcctgtagtcccagctactcgggaggctgaggcaggagaatggtgtgaacccgggaggtggagcttgcagtgagccgagattgcaccactgcactccagcctgggcaacagagcaagactccatctcaataaaaaaaataaacaaataaataaataaataaaaagaaaaagacaagagaaaattcctgtgttgtcagccatccaggccataccccttggtatccacaaacccagagcttctaaaggaattaggatttgccagaatgacactggtaagcaggccagcaatacagttctatttttgttggctaatttagtgacatttgttttcagaagtgtaattctaggaatgtttacttcaagcgaacacctgttgtctcttgagctagtgtgagggatgagtcaccgtgaattataatcatagtgataagagctagcaattaattaagcactttatgctagagacttttctaagcacttgacttgcattgtcacatttaatttttacaagcaccctatatgatatgtaatagtgtcagcattttacagatgaggaaactgagacacaaggagatgatgtgacctgcctaaggtcacagagtccatgctcttcatccctcatcccccatgtccttatccaagtctctccgagaaaggaagcgctagcactgataaatatgagtagggaagttagcatctgcaaatggtcattcattgtgaagagttgttgaagctgtctcggggggtactgttgccaagccatcatttcagtatggttgagaattagaaaggttaaggcccttctaccacttgtttctgtctgaagaaagcatctaatatctgttagtgttttcttttaagagtctggcccttggtgcttctgacataaaacagtctttctttctcccatggtctgtgctactgtatggtgcagtgaggcactgataacacctccatggagaaccagccaaagggtctggtactcaagcattggatcagtggtaagaaggatttcctatcacccctcccttcctcctccaacttgacatcactcctccttccattaggaaggctggttccacattgttatcaagccattcttagatcacttgggttaggaaatcccacagcccaaacctcttaagtgataagattctactctgagctcctgcctgactcccttctgaacttgactttttgaaagatgaagtgtgaaccctctggaataattgatacccatttgcagcccactctcagttctcattgatggcaaagatgcctgtaatacagaataacctatttcttgaaggccatatgccatacttcacaaagccttttctcaggtggcatccatgaagtggcagccacaggtaactgaatcttcaggcctgatcccctctttactatatcataaatatcaaaaggcagttgggctgaacaagaacaagaagcayaagaaattctggattattttatccctaaacaattatctataggctatgatccttcagggtgtttcctagctaaagtataggaacagcttctcatgttggttcagagacagccgttctgacaaccagggttgtcttgcttttctgagcagctttgtgtgagaaataccaggtattaagaagtctgttgtaggggagaatcatatacagactagtagaaaaagaactttatcatagaggaaaacacccagtttgcaggcattcttcctgaacactgctcttccgtctgaaaaggtcctgagtgtcaaagccccacctataccctgaagccatctcaacagactcggacccagacctttgtctcctgtcattttcttttcagagcattgccatctcttttgtctggctgcatccaactatttttaattcccttgcctccccactgtctgctgagtggataattaaacatgaagtactatgctttgttgagattatatttttaaaggacttgctacagggaactgaacggcaccttcgaaagacagactttgagggctgggtgcggtggctcacacctgtaatcccagcactttgggaggccgaggcaggcagatcatggggtcatgggttcgagaccagcctggccaacatggtgaaaccctgtctctactaaaaatacaaaaattagctgggtgtggtggcgggcacctgtaataccagctacttgggaggctgaggcagtagaatcgtttgaacccgggaggcagaggttgcagtgagctgagattgcgctagtgcactccagcctgggcgacagggcgagactctgtctcaaaaataaaaaaaaaaaaagaggttttgagaagaagaccactaacttccaagaagtttatgagaacagaattcagacatagaaaagatacattcagctagaaaagatacattctagctgtgtcttcatgctgaggaagatacaagcgtacaaacttacaagcttgtagagactattggttgttggtttctctgctctactgcttaagagtgtggacaccggagttgactgcttgggtctctgtcacttatgtgctgtgtgatattgagcagattaccttatctctctgtgcctccagtttttcatctgtaaaatagacaatagtagtacctagcttatagagttgttgagattgaatgcaaatgagcttcctagcactggcacatggaaagtactcaatccgtgctattagtgaaactttcatggagggttgagaaaacatgtgcttgtttcagatttgcataaaattcccatcttggagccattgtgataatccttcctgcatgtggcctaataataacctcaagtgtttttattttgattcttcatctctcagccaccccgctgggaggaataacaggagctgtgtgtctgtatatctagagctctctgataatgagtagatgagacgaacaggcctttgggttgactggcttcctggttctttttctcattcaggtgctagaaagcttcaagatcatggattatagccttctgttgggaattcatttcctggaccattccctcaaagagaaagaggaggagaccccacaaaatgtgcctgatgctaagcggactgggatgcagaaggttctctactcaacagccatggaatctatccagggtccagggaaatctggagatgggataatcacagagaacccagacacgtaagtgcagccacacacctacccaccctcttgactgtggcagcccacgtcactgggtaattatagacagtcacattcaccttagggtgggactctaggaattaatttctacttggtgctaaaatgggttaaactggtctccatttctattcatctaaagataactagatgagtggcagtttctccagttattactccttcacccacttggtttctttttttaacaatggctgaaaatgtttttgtccccattaactacatattcaaaacattcaccacaagaggaaggaatagactttgaatttgaataaacatgttttattgtttatttwttttttttttttttttgagacagagtctcactctgtcacccaggctagagggcagtggtgccatctcagttcactgcaacctccacctcccaggttcaagcgattctcctgcctcagcctccaaagtagctggaattacaaacatgcaccactacacctggctaatttttgtatttttagtagagatggagtttcaccatgttgcccaggctggtctcaaactcctggcctcatgtgatccacctgccttggcttcccaaagtgctgggattataggtatgagccactgcacccagcctgagtaaagatgttttaagcaaatacacaataagaatgatgttcgcaattcagagctttttrtctgcctaaggggattctgttgttctagtcctgcaccctgacagatgtggtctctcgtctcagccagatgtggtagtaactacaggattaatttgcatgtgtaaaatgcatattgactaacagaaacaactgcaaccaaagtaagttattgaaatggcagactgcatcagttatgtgtactagctgagcaaggagactgaaagaaagcaatcattttccaaggccataagtgcctgccttctagaattctccaacgatgactaaaccatgggcatatttcatttttgtaaaggaaattaacacatattaaatattttttgaaaagttctttcttgcaaatcgatctaactgtccaataatcagttaaattatcctatatcagtatggtgaaatacaataaggctattaaaaaccacgctagcattgaatataaggaaatgtttgtcatttagcaagtaaaaaaatcaggttataaaacatgataaataataccttttcttgactaataaatacatacacacacacacatactagaaaagcgtaccagatattaagtagttatctttgcatcctaggaataactgtttaattatattttttctttgtgtttttctgtattttatttttaaaagtaaacatacattactcttttgatcagaaaaaagtattgcattttttaaaaggaatattttataatggtctaaaaattcttgctcatagttttaaagtaggaataagttttaaattggattcttcccatccaactcttcacggttagcagctacgatattattctcctttgtagggaagtattaatacatcattctggattcccaggatgaccttaactgatggccaaaaaacaaaaacaaaaaggaacaaacaaaaaaaaaagatgaatgggagatagcccagaattcttaaaaattgtcaatttttattttcagtctatttattagaaatgattttttaacttcctattcttataatatgtaatcaaatattttctcttttgctccatcaacagaatgggaggcattccagctaaaagccataggggagaaaaactacttttatttatgggcattattgacattctgcaatcatataggtaagaagtttgaggagtggtcttttattatttcaaaatcaatctacaaaaggttctgaaaaatcaccaaatgagagtgattttacattctcatttcaatttttccatttatatttaggttaatgaagaagttagaacattcctggaaagctcttgtttatgatggggtaagtgacttattttccttattatactgtatatatttctgctttctcagagacttcagagtatgtgcaggaaactgtgttgctagactctaagaggaaatgaaacaacggtctttataaactcagaatcttaggttagtagatcagttcaaatctaagaataaggacaacataaatttgaatagctcttcaaatacatgacatccagcctagcggccagaaaaacaaaatgatatctgtgtctatgtgaaatccaaaggacctaactttgagagaggtctttttttgtagggatgatcagtagggcatttgaaatgaagttctcacacaaccaagctacagtaagtgtgagtcctgactctgatggtgaacagcctggatttgaactctgcattcactgctgaactagccatgtgaccaggcacaatgctggttatttggcctcttacccttgtttctcacctgtaccagggggatagtaatgacacctgcttggtgtgaacatgggacaaaaaaatgcatttcagtgttcaacacaatgcctaacaaatacacagagaaagtgaaaactttttaattggtatggatttctacatcaacatttatacatgctggctgcctgaggatgtctttttttttttttttttttttttttttgagatggagtcttgctctgtcacccaggctggagtgcagtggtgcaatctcagctcactgcaacctctgcctcccagggtcaagcaattctcttacctcaccctcctgagtagctgggacaacaggtgcgtgccacgacgcctggctaatttttgtacttttagtagagacaggatttcgccatgttggccaggctggtctcgaactcctgacctcaggtgatccacctgccttggcctcccaaagtgcagggattacagatgtgagccactgcgcccagccaagaatgtcttaattgatgtaactgaagaaaaaaatcagttaacaaagagcagtttctcccatctttctctctccttctttctcccattccgtctctgtctctctgtctctctctctcacacacatacacacacatacacacacacacacacacacacacacacgcagtcccatctagacattagatttctacttcctgctactaacaacatttattggcctaagttaataacttgaagtagcaattccaaagaatattttggtcaaggatttggtcacacatttccttttaagatgttagcagatactttcttttgaaagagaataaattatagatgatcttcttcttctttcttggaaaggagcmcataatttctcagttctgtggaagactgttaataacctttcagcatgaaagatctacattttgtccaccgctaaggactgacttcagtcataatgcacttttaaacaacaggttcacacatttatttccaagaattaacctctaagctgggtgtaggggcatgtgctggtagtcctggctactcaagagactggggcaggatgatcacttgagcccaggagttcaagtccagtcttgaatatagcaagaccctgtctctaaaagaaaattttttaattaaaaaaaaaaagaattaacctcaatcttactgagatcaaaaattcctcctatgaaagaaggtcaatatggtaggttaatttaatgtttccttccagctgagaaaggaagggactgcatacatagtacctcgaacattgaaggggagagagtgaataccctcattccattcccctcctgttttctgagaccatttcaatttcctgttaccagatggatctgaatcgtctagtcttgtaccaaccaggtgcatctaagggccccccacctttctctattkaaaacccaacactttggggggagaccaaagcgggcggatcacttgaggtcaggagttcgagaccagcctggctaacatggtgaaaccctgtctctactaaaaatacaaaaattagccagacgtggtggcacatgcctgtaatcccagctattcgggaggctgaggcaggagaatcgcttgaacccaggaggcagacgttgcagtgagccaagatcgtgctactgcactccagcctgggcgacagagcgagactccatgtcataaataaataataaataaattaaaaaatatacctatcatctgcttttcttttctttttaatgaaaatttctgtgctggttatatatcatgaacctatttttgtttgttttcagacatggctcttacttaaacaatgtttattcatgccaaagcgaacaacaatgtaacttctctttataggcaacggctgaactttaatcctctatggatacccctcaggctcttgccttctgctgatatttctaaattactgccttgttggaagaatgtgtccacttcaggcagatactgccaggataccagaaagagtacattttaaaagatgtagcagggccaggtgcagtggctcatgcctataatcccagcattttgggaggccgaggagggcagatcacttgaggtcaggagttcgagaccagcctggccaacrtggtcaaaacccctctactaaaaatacaaaaattagccaagtgtggtggtgggtgcctgtaatcgcagctactgatgatgcygatgcaggagaatcacttgaatccgggaggcggaggttgcagtgagccgagatccgccactgcactccagcctggcgacagagcaagactctgtctcaaaaaaaaagaaaaaaaaaaaaaaagaaatttctctattggaatccataagcctgaattcaaaatgaagcattatagaagcaaatttactatgtctacaagtgtacagcttggatacatgatttggataaatgattactaaataaacatagaaaagtagctccttcatccacctcctttcccttcatctatcccctttcctggatttgtaatcaaatgacccttcagccctaaagactcctgccaagcatgagagaagaatggagttaacagtttaattcaattcaactctatgcaatcagcagataattcaatgcaaaggagtcatctgttagccttgtctcctaggaatcctcctagcatctcctcaccttgctattgggagatgaaaccagaactttttttaacttaaacgtcaatgtcactcttacattaggatagttttgtttatgtctccaatttttgttcatgattaagggagttacccttcattccagatgacatttgatgcactggttgcctgtatgtaaaaaaagaacttaaaaactcctcctgggacacaatgttatgaataagggcagctgttttgatttatgtagcacagttttttttgctgactctcctctgctcagtttggtcttgagtgtctagaatctttgttccgattgagtctgtgccctcctccctcagccccagactcctgggccccrcgggctacaggacattcctgttttctatctctgggccacctttggttaagaatgttggctaacagagaaccaattgcatagatctctcttctgacttgagatgaacattaagagstgaccctgtgatcctgggtttttgtcttttcaggacactgtttctgttcatagaccaagcttttatgcagacagatttcttaagttcatgaattccagagttttcaagaaaattcaaggtaagattcttatgaatttttttttttacttttagcagctaatttcattatgtatctttgcaagatttttattggaagaactaacacatttctctccctgcagcagtaatcacttagtaattatggttaagtaacccagtcaggtgtttattgatgccataatcattagagtcctgcttagtggtgaaaaaatttagaaggtatctaaatgtccaaccatataatatattggttaaatatattatgatacagtcaaataatggaatagtatgcacccaataaaaatgatgtgttagcacatttagtttgctaaatatagatgtatttaccttttatgtagttatcagtctgtataccttaaatgcacagcagaattctaagggaatatacaaaacagcagttattctcataggacattctctaggatggatcatatgttaggccacaaaacaagtctcagtacattttaaatgactgaaatcatacaaagtatcttttctgatcacaatgraatgaatcaataaacagtgaaaactgaaaacttctcaagtatttgaaaattaaaccacacactcttaaactagcaatgagttaaagaagaaattacaaggaaattagaaaaacctcaagatgaatgaaaaggaaaacaaacatacsaaaaatttatgggatgctgtgaaggcagtgctctgaggaaaatttatagctataaactcttacctttaaaaaaaaaaaaaaaaaaaggaggccgggcgcggtaatcctagcactttgggaggctgaggcgggcagatcacttgaagtcaggcgttcaagaccaacttggccaatatggtgaaaccccatctctactaaaaatacaaaaattagccagacgtcgtggtatgcacctgtaatcctaactacttaggaggctgaggcaggagaatcgcttgaacccaggaggcggaggttgcagtgagccgagatcatgccactgtactgcagcctgggcaacagagtgacactgcgcctcgaaaaaaaaaaaaaaaaaaaaatgaaaaaagaaaaatctcaaatctataccctaactttaaaccttgaataactagaaacagaagagcaaactaaacccaaagctaacagtgcttattccagatcaagggagtatgtgggctcttattttcctttatattgatatttattaaattttctacaatgaatatgttgtatctgtgggaagtttttaagatatgtgaaaggagaaaataatcctatatatagttattttatcattttgctattctgtggtccaatttcataaactaaaacatgataatttagccatacacaactgaaaaagtagaatgttcatgttttatatttaaataagacaaattttcctggtaatatttattggagattttttaattaatgaaagtcaaacacttgcaatgtaaacattttggaaaatacaagaagatgaaaaaaaaatgaaaattcttgaaatgccacaacccagagatatccactgctaatactttgatgtactttctaccaatctttatttctatactttatgtatttacgttaaaatgatagcataatggtacacaattttaggtatagtcctcttttttcacataacattataacatgaatagtttataatgttatatttttcatatcattgtatattctacaaggcaccatttgaagttgcaacacattaaaattgtatgagtgtgacgtaatctaatttttttttttgccagaatctatttaaccattctttcagtattgggcatttacattgtttctcctttttctatttcttaatagtttatgaacataatttcagataaacgttgtgtccaaatttaggattatttctttagaatggattccaagaaaggggtactagggtaataaaatgcacgtaactgcacggatagattgtgccacagaaggttcccacgaggccatgagagcccgtattctgccagcccttagccagcattgtggtttttaaattatgccactctgataagtaaaaaatgttatctgattgttttattttgcatgtaagtactggtaaggttcaacccttattcatgtttattagccatttgtagctcctttgagaattgagctttgtaacatttgaccatttatattgggtgtttgttatttttccgaattattaatatcaattccatgtattaaagatattaacccctttttaaaccttatttcactctaagggaaactttcttccacatttgactctctcagtggtatcttaaaattgctgtcaaattgacatcaccataaattatttgcccaaggtttctttggcctaaaatagactataagatagtgtttattgagactgcaagcctacatgaataccagcttgtggttccaattttttttttttttttttttttttttttttgagacagggtctcactctaccactcaggctgcagtgcagtggcgtgatttcagctcactgcaacctctgtctcctgggtttaagcgattcttctgcctcagcctcctgagtagctgggattacaagcatgcatcaccacacccagctggtttttgcttttagtaaagatggggtttcgtcgtgttggccaggctgtcttgaactcccagcctcaagcgacccacccacctcagcctcccaaagtgctgggattacaggcttaagccaccgcgccctgctgtgtttccaatttttaagaaagatttttttcacttttcttagcactgtgccaaggttggaaaaacatgggtttcactgcagcccctggtgcgttttggaggatctagccctttaatgttctagctttggtgagcctcccttaggagactccccatcttgggaggtttttctttcttaggggcatataaattaatggtacaatcaatggcatcttcagtttcataaaatatggcatgtgtcgcagatttttccggtttggataatttttcaggtttttaatggaacaagttgtttaactcacgggtaatcaaatctattgacattttctcattttgattttattatctattttttaataatagctttattgagatataattaagatgtgtatgcttcacccttttaaagtgtacaggcctatgattcttgatttattcacagttatgcaatcatcaccattttctaattttttaaatttatttatttatttattttgagatggtgcctcactctgtcgcccaggttggagtgcaatggcgcaatcttggcttactgcaacctctgcctcctgggttcaagtgattctcctttcttagcctcccaaatagctgggattacaggcatgagccaccacacccagctaatttttgtatttttagtagagatggggtatcaccatgttggccaggctggtcttgaactgctgacctcaggtgatctacccgcctcagcctcccaaagtgctcagatacaggcatgagccaccatgcccagcgattttctaattttagaacattttcattaccccaaaaagaaaccccatacccattagcagtcactccccattccgtcctcttcccagcccctggcaactactgatttactttctgtctctatggttttgcctattctggcatttcatataaatcatataatgtgaacttttctgtttggctttttgcacttaacagaatatttttgaggtttatctgtagcctcgtagcatgtaycagtaatttattctttttattgcagaatattccattatattgatataccatagtttgtttattcatcagttgatggatatttgggatgtttccattttggccattatgaataatgctgttacgaacattcatggacaaggttttgtatgggcatgtattttcatttcttctgaatatgtacctagaagtggaattgctgggtcagatggtaactctctgataacattttgaggaactgtcaaactcctttccaaagcagctgtgtcattttacaatcccaccagcaacatatacgagttccagtttctctacatcctcactgacatatgttattgcctgtctttttttcttttggctatcctggtaggtatgaagtagtatctcactgtagttttgatttgcatttctctaatgactaatggtattaaacatcttgtatgtgcttattagcaatttatatcttctttggagaaatgctcactcaaaccctttgcccatttttagttgcctttttattattgagttgtaagagttctttgtatattctggacacaagtccgttatcagatatatgatttgcaaatattttcttccattctgtgggttgtctttttacttttttgatagtgtcttttgaagcacaaaattttttaattttgatgtccaatttttttccttttgttgctggtgtctttggtgtgatctaagaaagcattgcctaacccaaggtcatgaagatttactttcatgttttctttgaagagttttatagtcttagctcttacatttaggtttgtgattcattctgatttaatttttttgtatatgatatgaggtagagtctatcttcattcttttgcatgtgggatagccggttgtttcaccaccatttgttgaaaagcctattctttccccttattgaattatcttggcactcttattgaaaatcatgagagaacataaaccagacaaaaaaaaaaggaaaagaaagtcgattgaccacaattataataaggatttacttcttgactctcacatctgttctattgatcaatatgcctaccctcatagcagtaccatactatcctcattacttctggtttgtattgttaagtttcataatcaagaagtgtgagtctttcagctactctttttcatactgttttggctattctgggttccttgtatgtccctatgaattttataatcagtttgttaatttctgggggaaaaagggtagctggtagtttgataaagatagtgttgaatttggggagtgttgccatcttatatcttacatcccataaatgtgggattctttttagttaagccttatgcttacaaaggacttcaccattgaataatcagataaatgttcacccatatttttcttttaccttttatagattgttgtttatgttttcttttctttaatctatgttgtattcattttggtgtatgaagtgagggagatctaaccttgttttttcacaggyagttaactattgtcctaataccacttattgaataagatatttcacttcaaagcacagtcaagtactttatcacttttgtttattgcgtaggtagtagtgataatgtttatagtgctgctacagtggaaaatagtcctgctacagtgggaaaggtgattcctatctacttttcttgctttatgttttctaacatttatcatgacctataatgacctatactttaggtcctatgctataggttttacttacttaatgcctgtcccctttatttaaatgtaagctagctgggcacggtggctcacgcctataatcccaagactttgggaggccggggtgggcggatcacgaggtcaggagttcgagaccagcctgaccaacgtggtgaaaccccttctctactaaaaatacaaaaattagccagacgtgctggcacatgcctgtaatcccagctacttgggaggctgaggcaggagaatcacttgaacctgggaggcagaggttgcagtgagccaagattatgccccactacactccagcctgggtgacagagcaagactctatctaaaaaaaaaaaaaaaaaaaaagtaaggtgactgctgtatccccagcacttaatgaagccatgtgggtttggagggtgcacatattgtaatttttatttgttgaatggatgaatataccatgtatactgggtccgatcttctccttaaggtccaggacagatccctgtagagattatctccactacagggtaattttaaccattcactccctcttctggctccacacctcatccttccatctgctcattctcatatatcatagaaacaaacctcctcaacgatctgtctctcttcagttcctggtgtatctttttcctccttcactgtcaccctattggagatgagagttggatgtacttgctgtctcactttttttatttcttgtcactattcagtgttctccagtggcttttgatcccaccactctaccaaaatgttctttttgaagtaatcaacaatcattgctcaagccattgaacaactttcagttttttttgtttttgtttttgtttttgtttttttgagatggagtctcactctgttgcccaggctggagtacagtggcactatctcagctcactgcaacctctgcctcccaggttcaagtgattctcctgcctcagcctccagagtaactgggaccacaggcatgcgccaccacacccagctaatgtttgtatttttagtagagacagggttttgccatgttggccaggctggtcttgaactcctgacctcaagtgatccacccaccttggcctcccaaagtgctgggattacaggtgtgagccaccgcacccagcctctttcagtcttcttaaaactctccagcatgtgagaccactgatagcagttctctgtgaaataacgctcttcgcttgtctttcgtaactcaggacttccctggttgccttccagcctctcttctcctccttggtatcctttggaagcttttcatccctgcttactcttattgtggttgctcctcagggtccaggctctgactcggtctcttcttatacagcactctgggtaattccctgttctcccaagggttcagttaccatctgtgtacttgcaacttactccccacacttctagcaattccccttgcctgtccactccccaaacttaagcatccactagattccacaagctcagcatgcccaaaattgaatttagccacttaccaccccagagtctgcctctctacctgggtccacgtcttatggaagaccaccacaatccacccaattacccagccagaatgctgccatcatcccttgaccccttccttctgcttaccacccacgtgcagttactcagcaacacctatcagtcctcactctgcagtatcaggattgcagccccttctctcacagtacctctcctgattcagccactgtgttttttggtttgcaggttttattattattwttttttttgcataaagttgtggccccaaacaggtctctttgcctcccatcatgtacccattcaatccaatttccacacacacacactgcagctagaggaatcagtttaaaatataaatctgctcttgctgatttctgttaaaacccttccatgctaataataataataataataatgctaaaggaaataaacgtccatggattccctggtgcccaaagtccttaactttcacttaacacatttcctggcacacagtagacactcaatggttatttgatgaataatgcaatgaatgaatggaatttttatctaacaccaccatttcaaagggtaattaaattattagaaaagtagacacttgagttaactttaagatgttccatcaaccatggttaatttaaagcccttaatgcctaaaggcatactcccctcccaccaagaaaatagtacctggtcttcaagtttcttttttgaagtcagtgttttttaacctttttaaatcccttcatcccacccacaagtgagtcatgctgccggtgtaataatgtctacaaaatcctataatatttcctggaaatattagccaccattatgttgaaacttcactgaaattctccatacgaataatttgtctaaagtactaaagcttagtttcctgaatagaatataagagttaaattaatttgttagagaaaattaactgttctaaaacttcagaacaataatgcattcatgaacaaacactcgtgcacctattatgtatctagcactacactaagcactgatgatatagaaagctttttaaatattgattagttcctccctcaataatttaatagtctcttttgagccggagattgaaacatgtgacagatctgtaatgaaacaattgctaatatttctgcatatgctactatgggtacgcrgagagaaataagagaaaaaaagaccaattcttccaaaagagagctcacagagaaaaagatatttcaactaaatcctgaaaatgtaacccagagttcattaagaagagagacaggaagggcatctcaaggagaaagaacagcatgtgcaaaggcctaagggcagaatgaacatggtaggttccaatatggcagaagggtgagctgaaaagtgaacatggaggcagtcgagtggcagaatgcaaggctagaaatggacacaggatacctactgccagccatggttgagccaaagacaaatctaggcgtttctgccacacaaaaggaagcaaccagccacccaaaccagctctcaatgttacccagtcaaaagagatcctgagaattaaatttctgcaaaatccaagctcttatctgctgagtgagatcattcctttaaggaagaaactcaccacttgagacaaaagtgaactctttgttgtggtgctatgtggtcttggcagaggtttgttttccggtcttctctgctcctcattatacgtgatgctgataaagaacaaagagttacttctttttccagtcttttggccttcactccatgaaatgccatgagtataggtctcctgagtatcttttcctcattacacggctctcaccctgatcgcatttccttggtactgccgaaaaccttttgatcattgctgtttcttcgtttagagaaataacattgacctaagaactatgatgtagaaaagcagttctcaaaccttttggtctcagggccacattacacccttaaaaattattgaggacaccaaagagcttttatttatgtgggtgatagctatctatatttcacatattagaaattaaaattgagaaaaatttaaaaatatttattaattcttaccagttaacaaaaaaaattgcgtgttaacatcagtcaatttttaacataaataattacaaaatataattatattttccacaaataatttagtgagaaaagtggaattgttttacctttttgtttgaaatccttaacgtctggcttaatagaagataagttggagtctcacatctgcttctgaattcaatatgtggtgacatcacaggtcatgtaacatctagaaaactctacacatatgagagaatgaaagtgaaaaaggcaaataatgtcttatgatgatgatgaaaataattttaacatcacagatcttctgaaagggtctcagagaccccttagtttccaccccacatctgagatcctctgatttagaagttttaaaatacagctgggcacagtggctcatgcctgtaatcctagcactttgggaggccaaggcaggcagatcacctgaggtcaggagttcgaaaccagcctgaccaacatggagaaaccccgtctctactaaaaatacaaaattagccaggcatggtggcgcatgcctgtaatcccagctactcaggaagctgaggcaggagaattgcttgaacctgggaggcggaggttgcagtgagccgagattgcgccattctctccagcctgggcaacaagagcaaaactccgtctcaaaaaaaaaaaaaagaagaagaagcagttttaaaatactatattgaaagacaggagtttattgaaggtctataaaagttagcagatagagatgataggttgataggtgtagcaaaccaccttggcacatgtatacctatgtaacaaacctgcatgttcagcacatgtatcccagaacttaaagaaaaataaaataaaataaaataaaataaataaaagttagcagatagaatgttaaggcagaggccagtgtgacaataatggcttcttccttgtaaaacaagtgtaaccactgtttgagagagtggagaattaaggtaaacataacttattttttaaacattcaaaaatttcttcccctcaaagaaaaacaaattcaaggtttatctttttctcccctcagtttaaccagaaaacagaatgctaaagaactagaaaatgaaccacctagaaagcaacttaagaaaagaaagacacctgaaattcatgcttgctagttctgtgaccctgagcaagccacaatctttctattctcagtttctggrcctaaaaaagggccttcctcttcctcatacatgtggatggtttgagatatgcaatgtgaatgttggattccagactctaaagccctccacaaatgttatttattaggatgatgatattattatgattctaagactgctcgagggacaaataaaccttcccttctctttaagtggagagattgtcctccattcttctctcatttgtgtgtcccaaagtccttctccaattaagttcttgcaagcagcctctgggaaggccccagatgagctgtgtaatctaagctctgagattcccaaggctaaacacaattactctaatacacttactatcaggctacccctttatgcaaacttctaaaggaagagagacactgccaaaarcatattcaggggaaaacataaagaggcctcaacttccctctccccctccctccaaggaaattctctagcaatattaagccaagaagaattattgcagcaaatagtgaatgtaaataaggatggccttgctgccgcttaagcagcttccatggacgtgtcctccatgaagtcccaggcttcagcaagcatgattgatggtgaagtacattttcattagttcaggttcccaacacacttctgaagttgtagactgctgtttagacaaagattggaagtgaattatacgtctgacataaaaccatgacctagaaaagagctaaagggtaggaaatgtcagtggaaagtcacagaaagaaaaaagcaaccagaagtaacttggctaaattgggcaacatgagtagaagattaaacattggcatgtttagaaattcccagtcccaagttaataaaaccagggtcgtgagaattctctatactttaccatctgtgcttatcaactcacccatcctcctcccagcactagaaaaacattgtttggagaggggggaatgattctttagcaataaaacatttgaattttacctcaagtaagactttattgcaaaatctggagagaaattttaacttttaatttgctctaggaaattctgatttaagtcaagtcattttggacaaataatatagccaattcatcgtattcatcagatgaaacaagttcatctccctttccatatatataaaataagcgtcttgtcttctattcaaataataactaaaatgttaataaataataaaatattcacttttaaataaaatagtaatgtgattttacagtaaatatctgtatttgtccttttcctttctgtctagctttgaaggcttcaccgtctaagaaacggtgcaattcaatcgccgccctaaaggccacttcacaggagattgtgtcctcaattagccaggaatggaaggatgagaagcgggatttgctgactgaaggacaaagttttagcagccttgatgaagaaggtaaagatatgtaacttttttaaaaagacaaacgttcttgtgatttatttatacaagtaaatttgcagaagaaaaatttaaaaatacctgctctaagaaataaaatatattaattaagtttttaaaggatagctrcagtggccgggcgcagtggctcatgcctgtaatccttacactttgggaggcctaggtgggtggatcacttgaggtcaggagttcgaaaccagcctggccaacatggcgaaaccctgtctctactgaaaatacaaaaaattagtcaggcgtgatagcgggcgcctgtaatcccagctacttgggaagctgaggcatgagaatcacttgaacccaggaggcggaggctgcaatgagctgagattgcaccattgcattccagcctgggcaacagagcaagactctgtcccaaataaataaataaataaataggatagctacagtaagatgcagttcatgcacattttaactaccacataaaaaatacaatttatggtttacgataaaaattagacaatactaattcaaaaagaaaaatgtctgcttccactacctgatggtaacaaatactaacattttgttgcttttacttctagaccttattctgtacatgtacacatacacatatgcacgagtacacatacacacacatacactcaatgtaacaataagttgtctcttcatttaggtcttctttaatgatttattttttggtacccactggtaatactcaggaggtactacacgttctttactttgaaagcttcataaccatgagcaggtaccaagagaaggaaagaaaagaggcagaaaggaaaaatatggaacgtttcacaaatttgcatgtcatccttgcacaggggccatgctaatcttctctgtatcgttccaattttagtatatgtgctgccaaagtgagcgctttaatgaatttcaataaagttttataatatttttcttgtgtggcttgtacatataccttttgttagatttatttcttggataaatgcagagatattgatatagatttttttctggatttttaaaaacagtatcttttttaagaattgagttttctggccatttgttgctattgcatagacttcacaccctttttgtctttttttctttcttaacttgctggttaggacttcttgtacaatgataaatagaagtggtgattgtagacagccttgctttgtcctgattttaaagggagtacttctaatgtttcactgttgaaaaagaagtttgctgtatttgatacccataatcaagtcaaggaagttcctttttttattcctactttgctaaaagttttttttttttaattaatcaggaaggagtactgaattttatcaaatactttatctgccaagttaatcatttgttttttcccttctaatcaaatatgggagaatgacattttagatttttctattagtatattctttggagaatctcagcatttcctgaaaatgtcttctactttctacagaagttaagacctcttctaggggttttcttttcctcagagtctttaagatgtggtgttatttctattccttcttcagcagcacttatccatatgtgctgtttggtttctttctttctcatcttcccataaaccaacttttacctggagttaatgatttcagcaagagagttacagaggtgcccttgatcctctccgaattggtgtctccaattcctagcagacattcatccctttctcctaagctcccctgcactggcatctcccacactatactacctgattttctgatagcacatgcaaaactgcaggtgcctgtagtctgggaaataggataaacttattttaaaattatattagtttattgatttgcatatgttgaaccagccttgcatcccagggatgaagccgacttgatcatggtggataagctttttgatgtgccgctagattcggtttgccagtatttcattgaggattttggcatcaatgttcatcagagatattggcctgaaattttctttttttgctgtgtctctgccagattttggtatcagggtgatgctggcctcataaaatgagttagggaggattccccctttttctattgtttggaatagtttcagaagaaatggtatcagctcttctttgtacctctggtagaattcagctgtgaatctgtctggtcctggactttttctggttggtagcctattaattactgcctcaatttcagaacttgttgttggtttattcagggattcgacttcttcctggtttagacttgggagggtccaaagaatttatcccttccttctagattttctagtgtatttgcacagaaatgttcatagtattctctgatggtagtttgtatttctgtgggatcagtggtgatatcccctatatcattttttattgcatccatttgattcttctctcttttcttctttattagtctggctagaggtctatctattttgttgatcttttcaaaaaaccagctcctggatgcattgatttttttgaagggttttttgtgtatctatctccttcagttctgctctgatcttagttatttcttgtcttccgctagattttgaatttgtttgctgttgcttctctagttcttgtaattttgatgttatggtgtcaatttcaggtctttcctgctttctcttgtgggcatttagtgctataaatttccctctacacactgctttacatgtgtcccagagactctggtacgttgtcttcattctcatggtttcaaagaacatctttatttctgccttcattttgttatttacccggtagtcattcaggagcaggttgttcagtttccatgtagttgtgcagttttgagtgagtttcttaatcctgagttctaatttgattgcactgtagtctgagagactgttatgatttccggtcttttgcatttgctgaggagtgttttacttccaattatgtgatcaattttagaataagtgcaatgaggtgctgagaagaatgtatattctgttgatttggggtagagagtactgtagctgtctattaggtccgcttggtccagagctgagttcaagtcctgaatatccttgttaattttctgtctcgttgatctgtctaatattgacagtggggtgctaaagtctcctgctattattgtgtgggagtctaagtctctttgtaggtctctcagaacttgctttatgaatctgggttctcctgtattgggtgcatgtatatttagaatagttagctcttcttgctgcattgatccctttaccactatgtaatggccttatttgtctcttttgatctttgttggtttaaagtctgttttatcagagattaggattgcaactcctgccattttttttttccatttgcttggtaaatattcctccatccctttattttgagcctatgtgagtctgcacatgagatgggtctcctgaatacagcacattgatggatcttgactctatccaatttgccagtctgtcttttaattggggcatttagcccatttatatttaaggttaatattgttatgtgtgaatttcatcccgtcattatgatgctagctggttgttttgagctgggctgagttcttatcaggaagtgctgaagacgaatcctcttccaagctcattcatgttgtcggcagaattcagctccttgtagctgttgggtggagatccctgcttctttgctgtctgacagccaagagccatgtttagccctggggtccatccacattccctaccatgctgcccctctgtcttcaaacacagaatgtcctacaagtcagccccaaacactttgtctctctgacttcttgtctctgacctctagacccagatttaaagggctcgtacaattaggtgaggctcccctgaataatcttccctttgactaactcagtgttagccaactcagggcaacctgagttacatctgcaaaatcccttttgctaggtcacatcacatagccacaggaataacagctcatcatgtctgcaggccccacaacaaagggagaatttacaagagtgtgggtcattacgggtcatcttagagttctacctaccacactggctttagaaaaaagcatatgggagcatgaggaaacacttctctccctcaaagaactgctcctcatgggttgaggggtcaccttcccartgatgtgtgacctgagactgagtcactggacagatgtgttttgctctgtcactcaggccatgtctactttgtgaagtaaagctggtatgcccaaaacctaggtcgaagaccagctccacctaccttataaggagtggcaattcattggaatctgatatcaggttatttttgacacccagttttcaatgttatggagagttttcatgtttttctttccatttaatgagaagttgggatcaagaatattgaagattgcaagccaggtgtcacattaaagttgaagcctttctaatttttgaaggttgagcactttggttattcatggttttatatgacgatcatcttttatccatcgctgcagttttctattttgacttgaattggaggcagagctccaccaccccagtgtgtcgtctgatttcccagactagagtccagcctttcctgtgcttgcctggcttccctccatgttgcttcctaccccaccatctatacccttcacatccaaaatccaaaacctcacactcatacgagaatccctgttagggtcggtttatatttacacactaaaaatctctaattttgaatttgttgtgcctataaaggaataccaggaataccttaaagttataattgtatttattagcatctattttaggtcagtcttgggggagtgatggaaagaatccacatagactccagagagatgggcaggggttactgcccagccttgaacattcctctttcctcacaaggatgggctctcgcataagtaatttcatgggcccctaagttttaaagaaaaaataagtgttttctcatttttaaaaaaggcagctttgctgttaaaatatgtcartaagagtcctggataatgtttaaaagtatttatgggctcagatggggttaaggtagagctgactgttagtctgttgaagtatttgtttcccagctcttgaaaagcctgggttcttagatccaacctgagaatcatagatatgtgcatatcacagggagggcaaaaaggttcactgtctgtttatacacttgccagtcatccttttaatctctgccaaattgtctgctttaactcctatgagtttttttatgccatctttttgaaatagtaaatcactttattaggtttttaaaagaacattcataatgtcatttccatgagccattttgtaaattaatgcaatttccttcctgtttaacctgtttgcaagaagctattttacatttctgctgtaattcagaaaaaaaaagtgcagttaattcataattgaatttgcagcctgataggtaaaatgaatgcttttgactcatttcaattattatagatactaaagctgcatttatccttgagattcatgaatgtgtgtgttgctttcgttcctagccctgggatcccgacacaggccagacctggtccctagcactccatcactgtttgaagctgcttccttggcaaccacaatttcatcttcttccttatacgtcaatgagcactatccacacgacaggcctacactctattcaaacaggtaatacttagtgcagtcaaataacccatcaggctgttaccacatcaacatcaggcctgaaccagtatctctgaatgaggacacgtctctaacaaccaggatgtgcctgtcatctgcctcataggtcggagagagaacatgcttgatttttactgtggcaaaagaacattggagggaaaaccctcatgatttttctttacagttgatcattatgtcatgtagaaattatatacttggctcaatggaagaagacaaatctttcatcatttttattttagtaaattttttaggaatgggtttcttcagagtgagcactcttagttaatattacacaggtagctgcaaagatattgtaatattctcttttggtatgtgtgatcttagtgactatggtaaacagaataattgctcccccaaagctatccacatcctaattcctgtaacctgtgaatatgttaccttatatggcaaaagggactttacaaatgggattaaattaaagatcctgaaatgggatgattatcctgaattatccagataggcccaatataatcacagrgttcttgtaaggggaagacagaagaaaggtgagaatcagagaaggagacacaacatcagaagcagaaggcaggatactccatttgccctgatatgattattattcattgcatgcctgtaatcaaaatatctcatgtaacctataagatttttggaaattgtatgctctctagcaactttgtgtgaatttttatataagcactgttttataagttctatgaagtgttataaaaatagaaacaaattttaaaaaataagtaaaataacaattatctgttaaatgttagactagttcttgttgaaacctagctctcaataatcaagatcagatttatgcaggtgaagaattccttacgctttaagtcattttccatctccaggctagcagttcagttgatttccaggaagaggaatcaataaggtagatttatttttaatatatggatatccatagagtctagcttagtcttttggtaagttaaagtttgctagtcggacctgctataggaattcttttttgttgctgtttcctcctccctcagctagatacaagattaggtaggcaggaggttaggcggccagtctaggtccagaaaagtaratcaagtgggtagcaaggtgagccgcaaatcttagctgggcctgagtttgcactgttctgctctaagggccaacaaataaggctctattaaaaattatttaactcatctaaactatacaaagttatttgatttggtcagtttccttggaytggagaaatttaaaatgacttaaattaatgtgtaatacttagtagtaatgtcaaatgtttaaacctggtatgtaaattagtcaagcaacggcctttcctgtctgtttggtgcagctgaacacatgggtctatataaagttcttttgctctcaaatataaatagcagctcaaaagatagctggaaggttgcaggaagttcttagcaaggtcaaaaacaattctcatgtgaagccatggtgatttcttaccgtttgctgtcatgataattattggggcatataatcggatgtgctcttcaatcatttcgtgagattttcagccaacaataaaagggttttgttttgttttgtgttttggtagcagtggtggtggtggtggtggtggtggtaagtatccagtctcttgaccaggggtgttagactcttgggtattcataaggttttcccggggcctggcagggcctcctcctgactcccaatcgttcctggccatcctggaagctacctctgcatgttccacctccgcatgctcccagagctgtgctgtcattcttgatgcttttatttacaccgatactgactagcatatagatttggagggggaaaataaaaagttatctatgatatttttcctttcttttaaatatttatttaaaacaagtgcattgttttaatcttctttggcactgtatctccaaaatgcaatttgatatcttatatttcactatcaatcaaggttcacttgcaagaacaagaaaccacttaatcttaaccagaaaggaatttaatctagggaattgggtgcctacaaagtctgtggaaaggcagtgggcatgggctccaggctggcaccaggaaatccatcctggaacatgccaccaaactgagccaccagcagcactgtagcaggacccacagtcaagttggtgcctgccaatgagatgcaacccagacaaacgcatttcagtgagcctagaatgttgtttcaatgagccaccctttaaaaaccaaacaacttcgctaaaatacccagattcttttgcaatatcagtgtcttcgtcaccatataattttggctctgtttcctcctggcatttatcagctggaggggaaaacctgagaccaccccaggtgaccaccctcttcctcattcatctgtgctgtcacctgcctgctcctgtaggtatgtctgcttttagccttgatgtgtacaagaagctgacagaagggcctcgggtcttaatcacagacttagggaaatcataaggaaaagaggcatgaaggtgctaaaaaaatcttaaagacaacagtttgagaactcccaggagtcaatatccctatttccctgacccactgtgcccarccctcattattcaactggcaaacttcaccaacaaaccaaaacaaaagaaaaaattgtcatatttttgtttctatcattttttcctttagagcccacctagtcctatgtggcaataaatagacrctactctaaatctcatctggccaactgagtttcaaaacctaatcyagagagcctggaaagaaaatgcattgaaaagaaaaaaaaaagaaagaaaaagaaaatatgttgaatattgatgttataatttacatgtgagatttttctctttatgaatcatttttctgttcaggcaaagtggtctgttttccgattttgacattatgttatatgtatctgtgctaaaataagctgcaaatacttcaactagcagttgtcattctgtcagtctttttagaatccttaagttggcaaggtattgattagtgcctggatgcctccacacctaaattatatactgcagtgggaaactgctgtctcttagaattattcctttttttaaaggattattctttgtaacttcaaaaactctgatagcaacccattctttttttaatgtactccaaaaattggctaggaaggaaagaaaaaaaaatagtatcatcttaaaagtatgtatctaacctactgattgggagtacatattttcacaagttgcactgtgcagtcttgtgttagagcatgcagatcataggaataaagagaaactgtcatgggcattgcttcctagttaactagcaacatttaagttctgaatttttgatacttgcatttttatttactagtaagaagtctgttcttttaaaaagaggtataaattgagcactaagaaatatagaggcaaatgtgttttacctcaaagttaagaacaatttcatttaatgttgtagaaataggttacacttatgaatattttcatgatttcctgcgtagttggtagcaaagccaaagctctggttatgcataaggaattgaaagtcacacttcattccagtgcacctatgctttccccatcaaagatgtcttaccagtgtcaccactctatccagtctcaggtttggttggtggctatttctaacagttgggctcaccctgcagacatttgcagtattgtgagaagggcaaaaatgtcagagaaaaagccactggtcatttacacgtagagggaaaattggcaaaggctccctaaatgatgagtccaacattctagatctcagaggctaatccatcagatctaacagtcttgtgccctcttcttcctgccattacagtgtcataaacctagaacaggggtggaaacactctaaccagaagcccttccccacaaattgcttaccactaaggtttacagacatgcaagtagagccatcccagtggttagagatctttctttagatttgtctaaaatatcagaaaatggaaatgcagaaaccttacatggtatatccgagcgtgttagtaggacttcagttgaacacaggtctctagggtctaagcctcttgtcttttccactgtaccactcctgcatcatagcctccaaaaacatacaaggttggttggttggtttttttcctaacatgagttctggtcctgtgtttgagaccttttttttttttttgctgcttaataactaaaatatttctagcaggcaaagttgtgggcttatgttttggtttttgggttttggttttttgggtttttttgagagagtctcgcgctgtggcccaggctggagtgcagtggtgccatctcagctcactgtaagctccgcctccagggtacaagtgattcccctgccacagcctcctgagtagctgggattacaggcacccgccaccactcctggctagttattgtatttttagtagaggcggagtttcaccatgttggccaggctggtctcgaactcctgacctyaagtgatccaccctgctcagcctcccaaagtgcagggattacaggtgtgagccaccgcacccagccaatgggcttacgttaatgtctacctatagtatttgttctaccagctattggtgaattttgcttattaaaaacagcattgcaaaggcaacttttctatcataatattagtcctacttcaaaccaccaataataatcgaatacaatagcagctaattattggaccttattaagggccatgttaagccctttatacatatcaagtgatttaattctcacagcaattctgtaaagttattatatttacggtctccatcttacacatgaggaaattgatgcttagcaacatgaggtaactttctcaagaccacatggctaaaaagtggaggcatgacttccagctacagcactgatatagaatatacagtttcagatgataagttttagatgatgcttttaatggaaatttggtgacatccatacaagttctcgtcttcatctttttgccttttctttttccatgggattttgagtgaggattttcatcttcaaagatgttagagacagaatgttcaaacactttaaaaatttaacattaatttaaatttataagaaacctaaaatagctatttcctcaagttgttatttccaactctccaggtggactccaaatcactacgtaatcatcgagaaaagacttttattagatatgttcctgctgggtttagaaaatcctatatcttctgttgatacagcaaggtcagcaggaatctttaatatttacaaaatgaaaggagaacagctagttgcaaaaacttcctagtgattccattcccctaaccctaatctcaagggaaagacagcacaactgtgttacctgctgtgaactttgcagctacctgccatacctagacaccagtctagggctacacagcccctcgtaggatgatgcactcgttgatgctaaacattgaagacgacctctccagactctttgttcttttatggttttttgttttttgttttttttttgagacagagtctctgtcacccaggctggagtacagtggcgtgatctcagttcactgcaacctctacctcccgggttcaagcaattcccctacctcagcctcccgagtagctgggactacaggtgcgtgccaccacgcccggctaatttttttttagtagagacggggtttggggtttcaacgtgttagccaggatggtctcgatctcctgacctcttgatctgcccgcctcagcctccaaaagtgctgggattacaggcatgagccaccacgcccagcctgttcttttatgtttcttaatctgctgactcctgccttgcaaacagaccttcctacccccaccacctcagatggtggtgggtaaagatgctcatgcgtcttgctaaatcatcccttaggacattagctctcaaactgccacttctagtgatctaacattgggcaagttacttgctcgtcatgtgcctcagtttcctcatttgtaaagtgtgaattactatactactgcccccagagttgttataaagattaaatgaaataacaattagaaagcatttataccttgtggcacatagtaagccccataaaacatttgttgaaataaaataaccaagtgatttgagacactaataccttgcagctgccgcataagtctcactgtaaagggcatgatgtttttgacaaaaagccatcatggagtgctttgttagagtcctttcaggaaatggaaaacacacttggaatttcaaagggaattggttacagaatgtggggaggctggaagactgaagggggaaattccagaaactcaggtaaataactgcaggaggcagctcccaccatgagctctgccacgatacctgctgccgccttggagaagggacagtggcggaggatgctacctgaagagctgggatagtgcaagaacatagccacctccagagacactgccctgaaatggaagaaagataaatgagagcagaaagccagcagcttctgtcctcctgccaccttctcatccaactcctgcaatgccttgactgacaggacctagtcaagaggcctatgggatatcgtttgcaactctgggccccagcattgcaaagtagagttgagataggataaaaacaaccacaacacatggagcaaaagctagatagacacaggatcttttttaaaagagagagagaggaaagggtcaaagctttacaaaggtagtgtgagtgcaagaacaggaatcaatttaggcttttatagaagtaatcatggaaccaatttattctcatgccattgtaatagtactatgtaaagtagccataaattttttaatgatctgtgcaattagagactccagtatttaccaataagtctgtctgacaatcagtaatgcattccctggtactgtgctggttgtaaatactcatagaaatgtcttagctaattctagacacatgggatagatctttagtttgagaattcctcaaagaggcttgtaagcttgaggaacccaagtgagwctccctctgataaggcaggtgacacagtttgggagcagatagccatcacccatgcccttacaaaacayttctgctttattaccaatacatcatttgtgaacccaccacccctgcaacatcttatctgaatctttcttagtctggagcaaacacagaatgaggggaaaatgtggtcacattctttcattcttagtaaagaaaggatttagtcaccttttcccaagtgtcaagaaatgaagtcatcaagcaaatgataccacatgtttagagaagcaaaaaccttccttattcttcagtctcttgaaagaaggatattccattttaaaaatcaaaaccattatagcattaccagtgaacctgagtggtgtcacatctctctccagttgtggctgaggcacatgctgaaaaagttggaacctggctgcgagtgatggctcatgcctctaatcccagcactgtgggaggtgaggcaggaagatctcttgagcccaggagttcgagaccaacctgggcagcttagcaagacctcatttctacaacaacaacagcaacaacaacaaaaaacacatctgagcatggtggcacgtgcctgtagtcccagctacttgggaggctaagatgggaggattgcttgaatccaggagttccaggtttcagtgagctgtgatcatgccactgcactccagcctgggcaacagaggcgagaccttgcctcaaaaaaaaaaaggaacctgcagaagttttataatatgcctgttagtttagtttttcctccccacccccagaaaaaaaaaaaatagaagaaaaaacatggatttacatcacattagtctgcacctggattttgccagatgtcttttttcctttttgacaaattatagaattacttctgaagtgattagcttttcaaatgatccctcatatatttctgccagggcaggaaattgaagtgaatttttcagatatctgacattatatgaagaataatttaggattcagcattaattcaaagaacattcacattttttgaggaattcatgtgagataatatttctgggtactttttgtgtgttactaagatttttaaatcgatttagtttatggataaatcatattgccaaaaaaagtgggaaaactgttggccaatttttgaatattttaactgacaaaaaaaaaaagacttctttatccattctttgcctcttaattctggaactaaaacactacatctttatttcccttgacttaaaacactagtgctatgtctctggaagaatggtttgctggtagtggatgtacctttgtagacactcttcaattctctgccctccttcgtggagcctctagagaaatgcttctcagtgtgactagctcctacatcagggtacctacctctagaaatggagccctgaagtctgcattttggcaagctccttaagaaattcttacccacactaggatataaaagttctttggaaataaactcttctcccctctctgttctttctgagtagtgaaacagcacctgtctgtggttcagctgagacacagctggactctctgaagaaattaagagggcataacatgtaatgccagaaatataaaaccatagcaaagtggatatgttttcagattctagtaaggagaacaggacctcagttcctttctcatacttcagacatgcctggacaggccctaagcaaaagtgactttttgccttaaaggtgttaaaagaaaaagttcagctgaattaaattgaaaggagtttacttgagcagtgaacaatatgtgaatcgggcagcccccagaatcatatagcagattcagagagactccagcgccgacacgtggtggaagaagatttatggacggcaaaaggaaagtggcgtgcagaaaaccgaagtgaggcacagaaactactggcttggtcagagctcggcgtttgccttatttgaacacggtccgaacagttggctacatctgaytggccaagactcagtggttggcacaaatgtaaactatggttggtttacacttccgcttgttgtatagttatcgatgtacagaaaaacctttaggccaaacttaaatatgtaaggaggcagctttaggctaaacttcatttaacaaaggtattttaggttagcaacacctctgggaaatgcttcagccagccccaaacctgcttcccagtgtggttcctctgacctgaagccaacatacatttctgcccagcagctattcgtgacctccctgagtctacagagatccttggttctgtagtcaagcagggtaattctctttcagattccttggcctccactgactccccctctttgcttaaaggtcagtttggtccttctgagccttgagagtccccctctccaccctgaccatttcactctgctgtttgctttgtccacgtgacagttgcactcttgggtgaagctggccttatgcaaatttcgtctcaccctagagagcccctggccagcagcctcacacagggcagcacccttcccaggagcttgtccatacccattcagctgccttccctgccatggcctctcttcgagacgtttccctttggcccaaccactgtatttccatttgccttctgagcctagctcttgtgttgtgtacaaagtagtgttccctgtgtgggcctgggatctgtaacaggtgaacttccaggttcatgttaccagttctggccatgtctcctccacccagaggtcctctagctggggggtctgcaagaatcccaagattcatttttgtttctctgatatgcttcaaacatacaggaagagtaacaaacaatttcttccaaggcaagtagaaagttggtcccgacatcctctgtttaatccttctgttacctgtggagtcatcaccacagtagtgagccttatctcctgtaatttaaatgacttgttgatttgggagggaaggaatttcactggggaagtccactaacataaacctgctgctgaggactcattcacttcacagcaccaagctggcccagcctccccacagacagaccaaacgcctctaccacaacctgcctttgcatttagttcatgatagttatgggtgcaggagaattaggtaagtgtaaggagggaactaggagacaatgttaaactctccattcagaataatattaatctaaaatggaatcatttaataacctgttttcaaggataaagtaataaaggtgacatgtgtaatgaagtaatggagctcattatttttccagccagccctattaaaaattagtgtgtggaaggtcacaaataacttaaaaatgaccagatttgttttcaaaatgaaggatttggctataatgcaaatttcatcctgaaggctacatggggaaaaaaataatggtagagtttctctgtcttttctttcattgcttctcatcacactggaagaatggttcggactaagcactttgtctgggagaagattttttgtcttttatttatgtatgagtgcatttcagttggtgtcctcctaattccaaccaccctcacctgctgctttctgtgtggtcactgagttgtgacaggagagaggccaggtattcgaaggccaggtcaaagctcatttagggaaccggtcgagccttcgccttttccctgttcaccctcctgcctttccaacctaagtggtaaaactcatcctgaaagaatcacggagctttggagatgagagggaactttggccatcatgtcatccagcccttttatttattaaaaaaggtattgattgattttaaaatttataaattatttttgtaacaaaactctatgcccagagtttaacaaatagtcgtgtaacatgtgttaagaaaaagagcaagccgtagtccacctccccctacgtcttcatgtgcaatcaccttcaactctttgagctgattcctttggcaattactttggtttttctaaataacatgcttatattgttattgcttgatctattgggtgtaggcattagctaataactgcccactatagaagacgaagatttagctgtcttttctccacccgacacataccacgtatgtgtactgttcccaccccctcctcctacacccttccagtttccctgtatagttacatcttgactgtagtccgatcgatattgagtgttttattatggctttgtgaatagtgtcatatactatgtttcagtttcctttcctgtgtgactttttgtttttattgtaataaatgactgccttgttcttcggtttgcttagttttctgtgtatttttccttaatagaaccctaagctttccaccagtgtcttcatttcttctcaaaccatttaagtgcatgaggttctgttccttttattgtcttgcagaagtttccrccagacacttctgaccagcctggactgaactggttgccctctaggacctgatgtacaaatgttactttggggcctctctgctccatcattctggggattctagtaacctcttgtctgtatcagttccgttgtttgtcatctcctacatcttcctctttgcttcttcctctttcttggtttactccctcattttggtggaacacattttccagaagaaaatcctccagtatgaaaaatattcattgcaggcaaaatatttgagatcttgcatgtcttaagtctttattctaaccctaacacttgattgatagattaactagtatagaattctagattgcaaatattttggattttttttttcaacatggtgaaggcttggctccattgtcttctagtttccaattaccattgagaaatccagtgctgttctgatttctgatcttctgtaaatggcttgctttctttgcctgcctgtctgcctgtctgcctgcctgcctgcctgccttccttccttccttcctttcttccttcctttctttctttcttcctattattattattattattgcagaaacctgtaaactctttgattttctctcagagtctcagtatttcatgatgctaggccttggtgcaggtctattttcagccagcatgctaagcactcaggggaccttttcaacctgcaaactcatgttttgagtttggggaaattttctaaactattttcttatttcctcctctctattttctttttcctttttgtaattccttttatgcatacagaatatcctggatttgtcttccaattttctctacttttctgtcttcagtcccatctatttatgtttctgtcctagtttctgagagatttcctcaacttcatctcctaatccttccactgagtttttaatttccattaccatgttttataagaattctttttttgttcgctgagattttattttttagcaatctttccttttttcatgattgtaatttctcttttttcctgaagatattaggattatgttttttgttttgccctgaattttgtttcttctccctttttagtctcggttttcatccaggctgcctttttctctttgtagtctacatgttctatactggaggttttcctcagatttttggaaatcttcatttgtctgctcaactaaggcttgagtgggagactagaaaactgattagaggccaggtgtggtggttcacacctataatcccagcatatttggaggccgaggtaggaggactgttggagcccaggagttcgagaccagcctgggcaatactagtgagaccccatccctacaaaaaaaattaaaattarccaagtgcagtgacacacctgtagtcccagctactcagaggctcagatggcttgagcctgggtggttgaggctgcagtgagctgttattgcaccattgtactccagcctgggcaacagagcaagactctgtcttaaaaaaaaaaaaaaaaaaaaaaaatccctgactggaaacttaagcacttgagcagagcttgttgaccagcaagctattgagctggtcagactccctataggagatgcttccagtttcttgcttggaggagaaaggcctggctgtcagccttctgggacatctggcaggaacaggtgtcttagcatctagtatatacatatttacttcctctctttcttttacctcaattgcttctggtgtccctgggtccacacatcctgttctgtgttttccgcagggagaaaaaaaataaaatcctccagtcttctgttggaatggggagaggtttttgcctggctatatatttctttgcttttcccagtggtagctcaggattttcctctcaagtttgctaaattgattactacctgttcatatgcctttcagactcctaaattttgtctctcttagcttcttccaatcttctcccctctttataggtttatgtccttttttaaccctttattgtagtgtagagggttgagcgtgtctgcaaaattagatgagatgtgtttcatctgcctctgtttcttcgtctacagattaagagaggcccagagaactgctcagcgaagattctaaggtttgcagcataacttaatagcaaaagtggagctaagacctacaattcctgactccttgttcagggcagcctctttcaaaatagacaaaatcattaataatgagttaatccaaaatcagtatgtttctgattgtgtgtggacaagttgaaaaggctatttttcaaagagttctttgtatcttagctttgattggtatctcatcatgagacagtaaatcaggaaatgaggacttcccaatgccaacatgccccatagacaagccccacatgagagaggactagcgaaaaatgttgatacgacagcagtggctgtgctgttatactgctccaagtaactggagttgcaccagatctcctctacatgtgggaacaaacagggttgcagtcaaatacccaaatttcactggctcttgccccatctgctggggggcaggtccatggtcaagtgctgtccaagtagatctgtaagtccccagaggtgtctccttggtgctcacaaacaagtccaaacaagatgctagaaaggatggaaaagatggaaaatcattgcccttgagagactataatatttgtataaatagtcacaatagaaagcaaatggtattcaatgaaaaatctacacaaagtgagttaggcagacagagttaggaaaaatgacttgcctggagctgtgtatgatgcctgcagtaaaggaagagtgctacagggtgaaaactgcacatccctgatcatattgctcattgtccttggcataagtgctcagaaaatgtttcataattatccacatgcaacatttgagatgcccatgcttgactgaaccaagaaggcattccaaaagtgacaatgttgcttcataaagggtttaatttcaggaagatgtacattgatcacttttatttgtgtttgtaacaataattagtacatctgacttttcaagtgcaaacagatgtgttgaactcatcagcccaggcactgtgagagagagcagagctccccagtttgctcttgtcatttgtcccgtgtgtcattctgtggttaagacagatttaaaattcatttcctggcctcccgtgacatagaaacagttcttaataaacaagggactcccacataaagccctctcagtgcgatctctggaaaagtggggaactggatatttttgtttaagaatacacagctctcagatgtaaccagagcatggcacttctttgccaaaacaggaaggtgggtcacctgagagctggcctcgggttaaaataattacatgagttctggggagtggtgagagcttcatatttttatagcacttttatagtaatatttatgtagtattttactgtatccatatggaagatattttgtatccaatgagttatgactaccattaattcatgcacattctttttacatttttgtttataataatcctaagaactatgtctttgatgtgtactgtatgcaatgtagtcagccaagagctttacagatattattttatttaatgcacccatcaaccctctacggtaagcaccagtggagctgacaaaagggacttgcttagaaacattaatgtcaggctcatagaaaaatcaattattgccaaggtcattgtgtacccaaacctaagaccatataaaaaacataataacttgacccataagatgaacttctagataaaatgaaacttttttccctaaaatctataattcttcaaccattatgaatgtactctcaaatgcatcgtttgaaacattcctataggccgggcaaggtggctcatgcctgtaatcccagcattttggaaggctgaggcaggaggatcacttgagcccaggagttcaagaccagtctagtcaacatgggaaaaccccatctctagaaaaatacaaaaattggctgggcatgatggcaagtgcctgtattcccagctactcaggaagctgaggcaggagaatcacttgaaccccggaggcagaggttgcatcagccaaaatcgtgccactgcactccagcctgggcgactgaggagactctgtctcagaaaaaaaaagaaagaaaaatttctatgtttggatctcatgaaatgtgcctgtagttaatcaggaagtggccccattactgacaagaaagaacacgagttaaatagcaaatagttctgtcagtagaatcatatgatgtgatttgggctaagatcagtattttttgcatattcatatgttgctagagaatgtatgatatcttataaatctcatcactttccattgacaagcagcattgagtccaagttttacttagaagtgcattcagccaagtaacaggtaagtatagcttaaactagaacttttcaacgtgtatggtgaggcccattgatgagccacaaagagatgtgcagagagatatgtatcccctcaggcttcaaggtagggaggagtcctggggcagctgaagcccccagcatagttcacctcaggtgccagcagtctcctctgtgttccccagagggcagtacaaatattaccgcccactgtgattgtcatgacacaaaaaagatgaagaagcaatggcttgagatagaataaaggatatttgtcatttacttaaagtccaggtatatgcagtctagggtgggtacagctgcacagtgacactcttatgtatccaggttctttccatctttctgctctgccatgcttcactctggtttttgcttttcttgtttgtggcctcatagttacaagatggctgccatagcttcagacatcacgtcctctctccagggacttctgcaggaaggaaatagaaaaagaaaaaaaaaaaggtggggagggagaaattcctcattgcaaggctttttatgggggaggttgcccagttgtgcccccagcagcatcctctcagcagctcatggccagaagtggatcgcatgactctagctgcaaaggaggctgggaagaggcctacctcccctgagactacttcagaggagagaaagatatctttttttcacccatcactaggttcatgcctataacccttataaaagaagacatattaacaagagaaaggcatacaaatgcatttaatgttttatacgacagaggagctttcagaaatgaagacccaaaaaaacaggcaaacctgtgtagttttatgctagagttgatgaagaagtggaaagtaagattggctgaagggggtatgatctaatggtaaaagactggtgaaacttagcaaggcttctttgtttagattggtcaccatgtccctgtgtcttcagagataagtatatttccttcctccagttatagggagggcacctcttaagtggggtcttacagcctactacagaggcaggccagaggattcttttattgcctgcttcagggaagaagggtgagagaaggtcagagagtgaccttcctaggtttattacctgttttcttttcttttttttttttctctttagacaaggtctggctctgttgcccaggctggagtgcagtggtgcaatctcagctcactgcatcctctgcctcctggctcaagcgattctcccacctcagcctcctgagtagctgggactacaggcatgcaccaccatgcccggctaatttttgtgttttttgtagagactggatctcaccatgttgcccaggctggtcttgaactcatgagttcaagcgatccacccgccttggcctcccaaagtgctgggattacaggcacgagccatcacaactggccaaggagctgttttctcaaatgctaagttgccatataatgggtagaatatcctgaatcccatcactacagatctccacctactacctaaaatcaaaacctagggttctgttagcaaagacaggacactatggcttttgtacaggcaccagtgattgtgccaaacacagactgtaagggaaaagccagaatgattttttttaatgaaacatattttctgcttcttaagtaattgtttagactctttaaaataccacccaccagatcatttacccctcaaactaaaagcctgttctggaaatggatttgaaacagagcatcctacggacaagagagcggtttgtgcaaatcttagagaaatttttctcagtattcatttttattgagacatccaagcagcattcatgattttgtagctcttgagttataaactagatataattctttgctttttttctcctattcaatcgcatacttagacattaatatttttaattattttttaaattagatgggctctgtggaatgttgcatgagatgcctcaagaatcaggccacagtgttggaaagttatcataatgcaaacgtctcacaccacaaattttaaaaggttaattttttttggttcaagcagtattaactttggatatttagaaggatttttttcacatttcctcagaattggtgacagagaaaagtattttatggtattgcaaatattatatcagaaatgtatggcactgagaggagaaactaagtataatcgtcacctttgatcaatttataatttttagaaagttggttcatagtactcccaatattgacgtgtaggaaagaaagaataagaaagaaagaaaccaccatttccttgataacttgaaaaatcatagatttgaatgacagaaataattgtgaaccaagttccagtctataatgaggaataaactttttctgctttgtgaattcattttctgattatgaaaattatacaggaactttatgatagaggaaatttggaaaagacaatggttattcttaattccactaccttaatacaatcattaatgcctctgtaaaccccatcagacattttcagatgtgtgtcattcattatatgattgtaatcacagtgtgattgccattttacattatacatatttctatggaacaaaatactatattctcttcatatttcttttcatatttttctaggttttatttttatgaaagtcaaatagttcttccaggactattattaaaaccaccaaccccattccattccccacccctatttcctcctcaccaaaggcaaccacctttttcatctgatttttttagttatttctctcaacaaaatacttgagttgctatttccagtttttttgttctcactttggaagaggatgatatagctcccttttatcaccccaccttcacagtaacccttctcatcctctctattctccaagtagagttgcatcataattcctattagattgtaatttaccttatgtcataaacatattcgcaactgtgccctgttgtaaagtttcattatatttccttatacttttccccaaaatgatgttccattctgttttctttagttgtctacatatttattaataattgaatctcaaactctttaaaatgtctaattggttcagacgcgtcggatatttcagcagagttactcaactgaataatctctccccagagtcttctgaccttgtctagtctgctaagtttggtgcacagatgttatcctgggaacttctttcacctttgttctgggaattcactttgtctctaaagttggctccactgcttcatagtgtttatatttccctcttcttggtttagtcctttgtttctgcagagcacatcccccagtatctttttgagaaaaggactcatgggaagttaattttttgagatcttgcaagtctgaaaatgtctttatgctaacgtcactcataagaaatagtttagcaaagtatagaattttatttcagaagtggttttcaaaggcattattccattgtcttcaggctccctaagttgctgttcagaagttcagatttatccgtttcctgatcatctgcatgttatctattttctccccatctctgaaagtttaaagatgtctttttcttaattgtcttggagttggtcttattttcatctgtagtaaagcattgtattcagtggaccttttcaatctgcatactcaagtctttcaggtctagaaaattttcttttttcctttttggtctttttttcttaggtctaggaaattttcttgatgatttcattgcctctgttttttcttttctctgtgtatctcctcatttgaaaattgaagccgctagactagtcttctacgtttctgttgttttttctctgtctcccatctgtttgtctttttactctattttttgtgggatttcctcaaattttcatacagccctctaattcaatcaattctactgttacgtttttactttccaggacctcttcttgtcctgataatttcttcctttagtatcccgttcttttatttcatagttgctgtaacttatctgaggatgtaaataatagttggggtctaagggttttttggcattttctaatccctgcataatcttaggttattctagttagcttttttcgatattttcgatctcttttacaatagtagcttctctcagatttctcataatcgttggttgtctgttcgtacttaaaagcgtgtcaccggccgggcgcggtggctcacgcctgtaatcccagcactttgggaggccgaggcgggtggatcatgaggtcaggagatcgagaccatcctggctaacaaggtgaaaccccgtctctactaaaaatacaaaatattagccgggcgcggtggcgggcgcctgtagtcccagctactcgggaggctgaggcaggagaatggcgtgaacccgggaagcggagcttgcagtgagccgagattgcgccactgcagtccgcagtccggcctgggcgacagagcgagactccgtctcaaaaaaaaaaaaaaaaagcgtgtcaccacaaatctatcaagacagaaagtaagttagcagttacctagtgctggggattttggggaaatggagtaactattaatgagcacaattttcttctcgaggtgatgaaaatattctaaaattggttatggtgatagttgcacaactctgaatataccaaaagccattgaataatatactttaaagcaactaattatatggtatacatatgatatatcaataaaactatttcaaacaagaagtggggcactaacaaaatgattaaaagttcaaagtgcgtggctggggcttgtcatctgtgggtttcactgtagggcgatttggctgggctgtgtagttggggaaacctggtatttgtctttcttcttgggttgattagatccccagaaaaggctctaccaatctttccagcctggatgataaaggctggctgtcagcttgatggaagccgagttggggaagagaccgtctctgaatctggcaggctagtaccctccttatctccttattttcagttggtcccttatccttgtgctgtgactaatgatccccaatctagagaccttctgttccacccactccggagaataaacctccattcttaaaatagggttgagaaaaggcagttgcatgttggtagaagttttgggagatgatttacctgctgcttaaccagactttcaaccacagatacttaacttagctgcctcctcttaccccgacacatgctatttcatggattcccaatgcttctaattcttcagccttttgagagttttgtgaatcaagtgtgttctaggcttttccctcatttttatgagtttttagaaaagaagcaaagtgggaagcatgtgttcacaccatttttacctgaacagaaatacatattttgctctctccaattattcaaggtcattacagtatgaactatcaagatcatttttttaatttaaaatactgatttgggaaaaaaaagacattaaataaacatttccttgtacacagaatactcctgttttgtgtaaaatcaaaagatttgagcacatttatcccctaactaaaggcagaaatgttatttttcatatgcaagtagaaaaatcaatcctctctgaattcagagaactggttaaatgcattcaaaatcataagacttatgattagctgttttaagatgaataggtaaagtaagcttctggccaagtcatgaagcatttctttccctttgcaaatgatttaaagtcctcaaattctgactgcctcataaagaacagatagattttattgttgttacttgctgtagaaaaattagaggtttactaattgctttacctactcttctcacatggttctttgattttaagggagtcattcagtccatctagactgaatttggaactcagagaattaaaattatgggcagggggacagtggccaagcttactattctttatgatacttgatcttgcagctgacttaattcctgttttcatttctggtccctagagctgcaccgatattcatttcatatttcttaaaggtttatcaggtaaataagagagagaaccattcatagttaacagcacaattgtcatatatattgacaacttcaaggcaattctaaattgtctccttctctaatgaaaacatttcaatatgacaaaaaccttgatccaaattctgcttgttaattaccatgatttctaagatctccagtctctaaaaccttatgattctgtttctttctcaacttaaaatgccacccttcttttacttttgaaaagaacctttatctcattgcatcgatgaaagaaacttatatttgatttagattattactcataataacttgacctttccaaagcatcacagccattcagaacaagctacatttgcagcatctcaaataaaattgtgaggactaatgtgcaaaaattattaacaggttcaagatggcaacatcagagcattaaactaagcaagcagtcctgtgtgtggctcacacctgtaatcccagcactttgcgaggccgaggcagactgatctcttgagtccggaagttcaagaccagcctgggcaatatggtgaaaccccatctctactaaaaatacaaacattagctgggcgtggtggtgcatgcctgtaaccccagctactcgagaggctgaggcaggagaatcacttgaacccaggaggtggaggttgcagtgagctgagattatgccattgcactccatcctgggtgacagagcaagactctgtctcagaaaaaaaaaaaacaaaacctaagaaaggaaccattctaagcccaggaatccatgcagttgcataggtcacatgaccctgtagtcagccctgaaattatctgtagaaggaagacaygtttgatgtccctgccaatgataatttgctttggttcagctgttacggtgactaacacttccccagatcagggacctttacaatggtagtgggggcattcattatacagtcattgcctgaaattccacatttcaggtatatcctgagttaaatcacacagctattacactttagacaatagatccttcaaccgtgggtggtcagtattgggtggtggtgacttcaggtgctttcttcctgctctgacagtagctttcaatgggtcaaattcttcaagccaaattaaatgaaagcttgagttctgatccacagagaaaaagaacttgaataaatatatatctcctatttctaagctcccgacgttttgtaaagctacttaattttcccccatctcacttgtttttcagctcaatccatctgagcacctgttattcatatcagaaggaaatgaaatcaatagcattttcttccccagtggcagtctttaaacttccttctcttttgccagtaagtcatcattcttctttaagactgctgttgtatccaggcatgtccaagatttccttatttgttttgaactttgaacctgatagacacttagaaattcacgtggttccaccctcacccatagagcatgttatactatcacagtggactgaaatgtttcttaagggtttataaaaggatgattatgatgccattaagagaagtaaaggcccctaagggaagtaaagagctaatatttattcatcatgagtaaacatccgatcttagctatctcagaacaggacatgtattaatacattgaactttgaataaattggcatctcacttctgtggttgccttgctgtgaagggtactctcctgggtctgccacaaaataagcagaatccgacccaggctgacctgactccccatatagcccaggaagctgatgagcctggcatgtcagctcaggctgagaattcttctccccaagaaagcagaatcaaaacccatgcatggaagttacaaagaaaggattgttctatataaggaagagtttaataatgtggttaaagaagaaataggctaccctgaaaatgctaagcctctcactgtagctgagcagccatctgggaagactaccgtagaggggagagaaatagcacagagctttttaaactagaatgcctgtaggtttccttgtaaacgctgcaattctggaattctcttagctcccaagaggaggttgattgatcacaataaatacagagcctgatagacggaaaaataagcctgttatatgtgtacaaaccttctctccctttccttatgagcaaagtgaaaccagacctgcaggcatgtggccttatgtaggcctgagccttaagctgccaccatttggcaggatgtgcatcctttgaggaaattgtaaggttatatggccatggttttcagcttggacaggtaacctagcatagaagctttcgaattagaatgccactctgctgttgaccagctacactactttacctccctgcaccttaatcacctcatctacaaataatatcgacttcacaagattattgtgaggatgagataagaaaatatatatgactatctagtacaatgaatagaatatatataagatacatattctatgactcaattagttctgtgatttaatttgaaagtctaaggtgaagatgggggcagagggtgtccctggaaaggctaacgttctaatagagtttaactcaccattgccacttctgatggatagtctagttctgcaagaccaagcctttctgcctgaactctagtacctcaatcacaggctgggaatgacttaaggaaacgaagccagttccaaacgctaacacacagctgtcatacagattttgtcccacaaatgaacaatgatataaatgtagtcaatcttaaacttctgaattaactgtaaagtgatacaagagctttgtgtttaaggatgagaaggttcagcctagttcttcagtggttccatacttaaaccatccaaaaatacaggtatgtatccttatctattgaaaagaagaaaaggcagcggggygcagcggttcacacctgcaatcccagcgctttgggaggccaaggcaggtggatcacctgaggtcaggggttcgagaccagcctggccaacatgatgaaactccgtgtctactaaaaatacaaaaattcgccaggcatgatgcatacctggcacatacctgtaataccagctattcaggaggctgaagcaggagaatcgcttgaacccaggaggcggaagttgtagtgagctgagattgtgccactgcactccaacctgggtgacagagtgagactccatctcaaaaaaaaaaaaaaaaaaagctatttgtattcaaaaaacaaaacagtgggggtgtgtcagagggcacaggagctgactgaaagagctctcaatagctaaaattggaacaatttgagcaataaaataacacagttttgagttataacccaaagaataaatatccaagaggccatactaatattaatatatgattgaataaataaataaatggaggagaggagacaaaattcccatacagaagaattccaaatactgtatgtagctactccaccctgaaggaagtggaacacaacaccccatcccttaagygttggccacacttagtggcttgcttccaaaaagtacagcatggaaagggaggtgggggtacctttgcagtagagaagcctggtaaacactacctcagccaggtaatcaaggtaaacatyatcaatgataagtcatgttaatagtgcataaccttgacttaatatggtacttgacctctgtgatcttccttccaaaaacttacaaataccrtgtctaaccatgagaaaaacatcaagcaacccaaatcatgtgggacattctgcagtatacctgatgagtactcttcagaactgtcaaggtcatcaaaaacaagaagtctaaaaaaccatcacagtctatgagagcctaaggagatgtgacacctaaatgtcacatggtatccagagtgggactctggaacggaaaaaggcattaaggaaaatgaacaaaatctggatatagtatggaggttagttataaacaaaaaggcatgggtgcttcctctttcaaaatgacattacagaaacctgtaccacaatcatgcattatagtaacactttgttataatgtaaatgttgggggattgtgttctaaaactgtctcttgaggctttacttgaaatgatgggaaactcagtatacagctgtatgcagagaagatgaataagtaatctgtcaaatattaataccatgggtctttttgcagctgggtttaactatgattgatttattatgcagatcacattttcacctgccatagaatcccaatccatataaggttgaatatgtacaattttgaattttatagttcaaatgtcccagtttccagaatttggggttgggtaaaagttgtttttcatgcatatgtgccatttttggatacctgtggtagttgtttcaacctatgaatgaatcaagggcactgtgggaataaactacttccccacatattgtagctggacttttttgtggggacctttatgcaacctaataaatgatctctcataacagattgtagttccttgatgctccaactgaggagttttctagagcttccttccttgggtgagaatagtaggtgaaggtcattgctatagacaaacagaactccatcaggctgggtcctcaaatattttggcatatgtaacaactctgtggaaataataggtatcagatagagttctctgcttacaagcaagagaaactgaagtagcaaaggaaatcatgaggaagctaagaattagttcacataatctaaagaaaaacctcaactaccaagccaagggaagaatatgaaatacagcagctcagaggattcaaccattcattgagtaatatttatcgagcctctaccctctcccagacactgctacagggtgagaatccagcagttcagggaatctgtcacgccatgctttcatcaagcttgcttctagacaatctcagactcagggacagcatcttctagaagacattctcttcctctgggaagcctgagactcatggacatactggtgttattacttagctcctaccacttgacattcttcatcacactgcccaaggttcagatttctctgagagtatgatgagcctacattgatgagtcaaaggctcacccccatgggggtgaggtgctctgatgtgcattcccaacaggactacacagaataccagaaggattgctccccaaaaacccagtgagctgctcttaccaacagaagaaaggagtgctgagtgggcaaaaagttcactataatttgtattaatagtgtgaagaaagaaaagagaagactcagatctggctcagaattctgattaaagctatttatgttagtataaccttgggcatgcttccacaatttctctaaaagtccctttcctcatctatataaagtggaatcataatacccataccatagaatcgttttgatgtttaaatcaaggatcaaactagctatttaaggacctgttctggggccaggcatggtggctcacacctgtaatccccgcattttgggaggccgaggcaggtggatcacttgaggtcaggagttcgagaccaaccttgccaacatggcaaaaccctgtctctactaaaaatacaaaaattagccaggtgtggtggtgcatgcctgtaatcccagctactcgggaggctgaggcaggagaatcgtttcaatctggaggcagaggttgcagtgaaccgtaatcagcctgagtgagagagcaagactctgtctcaaaaaaaaaaaaaaaaacctgttctaataactgcttaataaaaattagttgtattttcacacagttgtgaaacatagtatctacagattattttccatgcatttctagcacatgatatttcaatacattctgctcttttttttatcttagcatgaaaatacttgtagggtggacagtgtgttaggatccttgtttatatatatatatatattttttttttttgcatgtgttgactataaagttttgcttagtaaatgtcacatcagccacttcaaaagaggcatcctatctcagctcccagttatgtctcatgaaagactttaagagtgaaatctccaagcactgaacctctccaagattctctactggatttcactctgcctgtcttgcctgtgtcatgctgggggttttatttgtagagggaggcattgtaagggaggttatatatttactatccagacaaacctgggttggaaacctgtgtctttgggcacagtgcgtagcttctgagggcctcatgtgcttcatgtgtgcaactgggatgttaatacctaccctgatgggttgttaaaactgtaaatgaggccgggcgcggtggctcatgcctgtaatcccagcactttgggaggccgaggagggcagatcacgaggccaggagatcgagaccatcctggctaacacagtgaaaccccgtctctactaaaaacacaaaaaattagccgggcatggtggcgggcacctgtagtcccggctactcgggaggctgaggcaggagaatggcgtgaacccaggagccggggcttgcagtgagccgagatcacgccactgcaccccagcctgggcaacagagcgagactccacctcaaaaaaaaaaaaaaaaaaaaaactgtaaatgagataatgtatgtggcaggctcagagcctcaatcaagggaagctattactattattaggggtgctgattgtgtcatcatttgatcgcaggcacagtatgcttggaaatgtagaattttttattcaacagtactaggggaagaaaaaaaaacacagactcagatttttaaaacaagactttgccatttataagaaattgctagaaggcagaagaaaaatgctcaccagcccagagtctaggaccacccattttcttaataggtcaacattgtgagatatcttctgtacctgagcacatcctcccacccgaggcccttccgggaattgctttatgatctaccggaaagagagccctgttctcataagtaaacaaacttcagtggggaagactgataataaacattgaagaaaggtcaaatatacatttggaaacaaggggaatcagtgtttgttcagaagaacaaaagagaatgtgactttagaaaatccgtaaaagggtcttaatggctgttcaagtgagtaacattgaggacatatttgttgaatttctaattcataggacatgaaatttttttagttgtggaggttggattttttcattaaaaaaatagcccttacttaccccaacacccttactttagaaattggaaaaccagggtgcatagaagtgacattacttacttaacatcacacagataggtagtagcagaatcaagaccagaatctagttcctcaactctgaatccagtgacttttccattgacatgttcttaaatgttataaaggatgatggtaactttctaaaatcattgactgataaaatctaaaattgtttaaaggagcatgtgtttttccttaaattgcttctcactgaaactctgtgccatccagaattatagctagggttaattacatgttgtcaagaccaggcactacgccaagtcttttagatgcgtattcattgtgtacttgtaacaggattggcctaagctttgatgattaccactagggtttggttgttcctggcaattagtaggaaattgtcctacccaagcaatatgcatgcagtcatctgagataatctttcccacaatatgtggaaaagtgttggtaaggcagagtaggttgtgaataccaagatggatggaacttttgttcacccaactgtgaactttattccctcactatatatcgtattccatacacgatggtgtgtaccctttttcaggtttccatttttagaattgaagaaaatgggctgttgctttcaaaaatcatgttcatttaaattgtgtttttactctctgttaagaaatcacatataaacatatggatttgagcaccccctgcgatttttctggggtcccaccaggatctgtggctgcctaactgatatccacctctccagcatgttgccagcagccacagtgactccaatggaagcagcaacttcaaaatattatgctaaaattggctcctaatgttttcctcttgccttcatgcagtagcatgccagagcccacatcttcttgcttgcyagagtcaaattttgcaagccagttgttaagaacagcgatttttattatttaygtatttatttattgatttatttattttattatactttaagttctgggatacgtatgcagaacgtgcaggtttgttacataggtatacatgtgccatggtggtttgctgcacccctcaacccgtcatctccattaggtaattctcctaatgatagagtgccccccactccccgacaggccccagtgtatgatgttcccttccctgtgcccatatgttctcattattcaattcccacttacgagtgagaacatgcagtgtttggttttctgttcttgtgttagtttgctgagaatgatggcttccagcttcatcaatgtccctgcaaaggacataaactcactcttttttgtggctacatagtattccatggtgtatatgtaccacattttctttatctagtctatcattgatgggcatttcggttggttccaattatttgctattgtgaatagtgctgcaataaacatacttgtgcgtgtgtctttatagtagaatcgtttataatccttatggtatatacccagtaatgggatttctgggtcaaatggtatttctagttctagatccttgaggaactgccacactctcttccacaatggttgaactagtttacagtcccaccagcagtgtaaaagcattcctatttctccacatcctctccagcatctgttgtttcctgacattttaatgatcgccattctaactggcgtgagatggtatctcattgtggttttgatttgcatttctctaatgacgtgatgatgagctttttttcatgtttgttggctgcataaatgtcttcttttgaaaagtgtctgttcatatcctttgcccactttttgatggggttgttttttcttgtaaatttgtttaagttccttgtagattctggatattagccctttgttagatggatagattgcaaaaattttcttccattctgtaggttgcctgttcactctgatgatagtttcttttgctatgcaggagctctttagtttaattagatctcatttgtcagttttggcttttgttgccattgcttttggtgttttagtcattaagtctttgcccatgtctatgtcctgaatggtaatgcctaggttttcttctagggtttttattgttttaggtcttatgtttaaatctttagtccatcttgagttaatttttgtataaggtgtaaggaaggggtccagtttcagttttctgcatatggctagccagttttcccaacaccatttattaaatagggaatcctttcttcattgcttgtttttgtcaggtttgtcaaagatcagatggttgtagatgtgtggtgttgtttctgaggcctctgttctgttccattggtgtatatatctgtttttgtaccagtaccatgaagaacagccatttgattgttaataatgggcgatcgaggcgggtggatcacctgaggtcaggagttcaagaccagcccggctaacgtggtaaaaccccgtctctacaaaaaatacaaaaattagctgggtgtggtggtgtgtgcctgtagtcccagttacttgggagcgtaaggcaggagaatcacttgaacctgggaggcagaggttgtagtgagctaagatcataccactacactccatcctgagcgacagagcaagcaagactttgtctgaaaaaataaaaatataagtataaaaactttatgtacatacatatgtgcacatgggtttttttcctaaatgctggttgttaagcctttacttgtacacaactccttctgagccagtcaagtctataacatgtgtttctttatataattatcttcaacaataatactaataactaaaatgtattgaacacaagggacagattttataacagtcagcctcactgaattctcccaaatgctccagggaccaggagacaatgaggagggtaaattcaggcacctccagcatgagcaaggacatctaataggtgccttccgaaggcaagcagatggtagacacttgcacatgttattatttacatcaaccctgttgtaaataacgagagtgatttttatcactgtgatagggataaagaacaagctcagaaagataaagtgactgcccaagcaagccccagctaagtaatgctggttagaaggggagaccacaaggcaagaactaaagccttccagtgcctgctcccgcaacagctcagacgtaatacaacaacctcatctgttgcagtgaactccagcctgggcgacagagcgagactccatctcaaaataataaaataaaataaaacaaacacattaacaagaaaaaaaaatctaaggagaggctgtagatatgtagatacatcaatgataaatattttgagagcatttttagtaatagccattaagaaattttatgtaaatacgatttagatatacctatgaaagatagacattatccaaaataactaaagcttaaatgggactctgaaaatggataatttagactttttaagaggaggtcaaaaacataggaaaagggtatatagtttcagtgacagcttgtaaacattaatatttgtatttacaaatggctaagcacattaatacataacaagaagtcaggtctataaacagtgtaaaattatggggagcgtatttgtggttcttaaccaagggcctaatcatttattagtttacatatatgtgctttctggaaggtaggatttattcagtgtgatgtggtaaatggttacatatctgacctaagggtggaattcagagctcctgaacaccagccaggccccagcctcctaagccagaatgctaacccctacagacagtctaaacactagcaccaagccaggaggcacaggcagggccttcagcagtgccctttgacccatatgttactcaacaatttttttcggggtgggggagacagggtctcacactgtcacccaagctggagcacagtggcctgatcttggctcactgcaaccttcacctcccgggctcaagcgatcctcccacctcagcttcccaagtagctggaactacaggcgtgtgccaccatgcctggctaattttttgtagaaatggggttccaccctgttgcccaggctggtttcaaactcctggactcaagaaatcctcccatctcggcctcccaaagtgctgggattacaggtgtgagtcaccacacccagccttcctcttcattcttgctaagatggatcattctggtcctcagtcattcttagaagcatactatgccatttctagactgcacatctcactgctttaccatttctctaagccagcatttcttaaagtataggctctagaatcacctgcttcagaaacaagttgtttaaaatgcagcttcctgttgtcaattctaatgcacattaaagcttgagaaccactatttaagcaattggagtgttactaatgtcagattctaacacgcctagccttgatccttaacttataggaagggtttgggtatataaaagaaccactgccagagattactaaagctgtaccatgatttagaaaccagaacaagtatgtctatccctaaactgcttacgttcctagtgactcaggacaggtgtcgacctgtatagcagagaccagtagcttctgtgacattttctgattagtcagatcagaacttgtaattcgtttggtgtcagcctagccacgaatgagagaactttcctgtcattctgcacctctttgaagctagcaaggacagaaagtcaattctgcttatgattttccaatagctctgaacagttataattacagtgtacatctgtgagagcgaagctgcttttctaatctgttttcatattattttttcagcagcttctgcagacctaatagtaatttgggttttgactgaaggataccacttacatgctgagggtgctcatttcaaccctgtgtgtttttagcacattgacatggtgacaacctgagtagagtctgaaagctaaggcacaaacactatctagcaattcctggtcactaataaaggtttaaaaaatgtttgttggattttactgaagaagggccttgctttttgttctgggtttttgtttgttaggttggctggttttgagacagttttgctgtgtcacccaggctggagtgcagtggcacgatcacagctcgctgcagcctcagccttgtgaactcaagcagccctcccaccccagcctcccaagtggctgggactataggtgtgtgccagcatgcccagctaatgtttatattttttgtagagacagggtttcgccattttccccaggctggtctcaaactcctggactcaaataatctacctgccttagcctcccaaagtgctgggattacaggcatgagccactgcacccagccacgtcttactttttaaagacagaaaatgtagtgtttagcaagaaatatgaattgtactttttttcagttgcctaaaatataaacttcctaaaagttaaggtgtttatttatgaatgcatgtcagtgagaagttcttttttcccaaggtggtgttatggagggaaagtcagtgagtcagcctatttgccgaggccagcttgtccttcaggcatttataccaccagtattagtttgctaagctgcccttacaaagtaccatgaactggatggcttaaacaacagaaatttgtctcaccgttctggaggccaggagtttgaaatccaggtatcagcagggttttccctctgaggttgtgaagaagaatctgttccatacctctctgctagcttctggtggtgtgctggccgtctttgacattccttggcttgtaaatctctgcctttatcttccatggagctttccttgtgtatttgtgtctctatgtccaaacttcccctttttataagaacaccagtcataccgaagtaggacacaccctattccactatgacctcatcttaactaattaygtctgcaacaaactcattcccaaatagggtcacattctgaggtactgggggctaggacttaaacatatgaattttagggagatgcaattcaacccataacaacatggctctgaataaagctttgtttttctgagtaatttttgtttgtttgaatctgacagcagcaagtatagagattgcagagtatctggcagcaaaccactatccatgggaattatgccattgaggtgtagtacagagaaataatagtgcttaggccaggaattgtttcctgttcactgtgtcttaaacctttattggttccattagcttacacagcaaaaggcatttccaattcagcatattttatttccagtatgccactctgatctcaaactttagttagagaagaccaactaaggctaagaatcaaaacttttggaagctagcaagacctgatcaaatccaaactcctgatttttacagagaagggaactgtggagtacaggaaaattcaatgtcttacccaaatacagtactcacagctacttagtgccacrttgctaccacaaccccactaccctgcctcttgctgtagctccttctttcacatattgtactgctcctctgagccacaggggccatcggtgccctatgacagtggtccccaacccttttggcaccagggaccagttttgtggaagacaatttttccatggattggacggcagagtagggatggtttcagaatgaaactgttctgcctcagatcatcaggcattagattctcatgagaaacacaaaacctagatccctctcatgagcagttcacaatggagttcatgctcctttgagaatctaatgccaccactgattactgcctaaggcagagcttaggcagtaatgctcactcacccaccactcacctcctgctgtgcggcctggttcctagcgggccacagaccagtaacagtctatggcctgggggttggggacccctgccctatgattcaaaaggtcccaattcctgttgccttcatggtgcttttctctagctagagaacacagtcaaccctgttttcaatgtgtgctgtctacctgggaatgtttcatggatggcccatactgccattttttaaatctacctaagcctcacctctgggatctacctaaatatattctctcttaattccatggatatgagctctaggaagggaactaattataatgttagactctgccacatatgaacagtaaaacacattgtcctagagagcagaagccatccagtattgtgaagcttaatagaaattactttgatgggcctagcatggtggctcacggctgtaatcccagcactttgggaggccaaggcgagcagatcacctgaggttgggagttggagactagcctggccaacctggggaaatcccatctctactaaaaatataaaaaattagccaggtgtggtggtgcttgcctgtaatcccagctacctgggaggctgaggcacaaacatcgcttgaacccgggaggcagaggttgcagtgagctgagattgggctactgcactccagcctgggtgatagagcaagactttgtctcaaaaaaagaaagagaaattactttgatggtgaaggtttttattttggtttgctgttgttgttgtcttggatgttattttggtggcgtatttttttgcatttatatatttcataatcatataattattggcttcttttttttttttttttcgagacggagtctcgctctgttgtccaggctggggtacagtggcatggtctcggctcactggaacctctgcctcccaggttgaagcgattctcctgcctcagcctcccgagtagctgggattacaggtgtgtaccaccacacccagctaattttttgtatttttagtagagatgtggtttcaccccaggctggtctcgaactcctgaccttgtgatccacccaccttggcctcccaaagtgctgggattacaggcgtgagccaccgcgcctggcctattggcttctttttaacatttattattaatatatatctcctcaacttttgggggtttttagggtttttccccagctttattgaggtatacttaacaaataaaaattatatatatttaaggtgatacattgtaaaatgattaccacatcaagccaattaacatatctatcacctcacgtggttatatcttttgtgtggtgagaacccttaagatcaactcttctagcaaatctcaagtacacaatacgtgattattaactatggtcaccacactgtgcctcagatctccagaacttcctcatctggcatacattttggccaacacctcctcacttcctcttctttccaccagtaactatcattctagtctctgcttttatgagttcagctttcttagattttacaaatgagttcatgcagtgtttggctttttgcgtctggcgtatttcatttagcataatgtcctccaggttcatccatgttattgcaaatggcagaatttccttcttttttaaggatgaatactcttcctttgtatatgtataccacatttgctttaaccattcatcagataaggcacacttaggttgttgccccaactttttgggaagctccctaagttggtgttctgaccatgtctgcttactttttggtttaagcccagcacttggaatgaagtaggcactcagtatacatttgaatggatgattggtagttttgtagggagaaaagcagatactgtttattatgctgacagttcattattaaagtaaaatttatatatagtaaaaatgcagaaatctttgtagttccataaattttgaaaaatatgtacccaagttaccatcacccagatcaagataaagaacattcccccatcccaccagcaagttcccttctgccccttcttagacgtgacccgaagggcttttctccttcgttttttcctggaagctttctacgtttaactttcacattttgtcggtgatccatctcaaattaatttctgtatatgatatgagtaggggtgtcgaaggtttctgttgttgtgctttaacaactattccttgttcctttgatgaaatcaaataatcaagacttgtatatagaaatagatttgtcattgggaaatggatctctgtatctctttttctcttttataattgaaccatggttgctggggataacttagaaacacaggaaagggctaattttctgcagtgattggatggctcaaggcaatatgtgtaggacaggttactccagtcagacctacgttcaaatccaaatgccaccagaggtgagacaagatagtcttaatactcaaatgtacaaaataaatagccagagacctcacctaacagggttctttttaatgagtaaatgaaataacatgtgtaatacagtcatcacagtataaacatcacagtcaacgatgcctgctagctttacacctgtgcttgtgtgtgtacatgttggggtatgatattggaaagaaaaacaaatctcatagcgatatacggtgaaaaaggtccctgaacttggatgagggttcctctttaaaaaggtttctccctccagccaacccccacacacagagtcactcccctcaaagggagaggaggccctcttctcacctctgaggctgctcatggcaggagctcagtcactgccagttctctgagccattgtggcttctgtcctcacaatgaataaacctggaaacacactgtttgagtctcttcctgcctatgggttctaagtgctgctgtctgagctgtgcctgcagcaggcttcctgcttctggtgctcactgcggggaggggagccatcggttgataccaggagagagcctgctgctctgctgccttcattagaaacaggcagtctccttgtctaaaaatagcaaaagtgggagagtggggaagagcagcagccatgctcagggctgaaagtgagaaaggcagaaacaagcagatctctgaaagcctcctgtatggtggcaggcggctaagcattctgggtgcagtgactgtggtcaaagcttttctacttccctgggtccgtgttggggggttttgtagatgtgtccacacactcagccaagggctgagcatgaaggagccgctctgtcctggcaggagcatgagatgtgccacacgctgatactgtccaggctgcagcaggagcgctagtgctagtgcttgagaatttccacaccctgtagtatcctcacccactccctgccccaaccaaaggtgagctttttcccagtggggcacaaggtgttggtttgaccatcacttcagaagcgcctgggtcacgctggaatgggcttgcccttaagcagagtgtggctctggtactaaacaagtctttgcagccattaagtgagaccaggctgtatttgtgggtgttctctgcaggtagagctttcctgtctacatttgttatcagttaatgttctggtagctaaactaagagcagaaaaggaattctttccaaggtcttacgataaatctgtctatgcaagcagacctcatcaaagccccatgaaaacaggcagagtctcagaggtaagagtcctgttgatactcctgtttgcttatcccaaagagctttaccctctcttggcctttctttctcttgtactatccaaactgatcctcttgctggccttgtgagatgggctgggcatctttcccacccacagatgaggaaccaggagctcagtgtcataacttgcccagcattgtaaccagtaatcagagacgcagagcttgtatcaaggcctctgcccttcgcctggatattctctgaggtttcttccccacatgacagtttctgaagggcaaaaacctcctaacatgaagcagcctaaaatgtggcatgaatttaagcaaacttagggggcaaaaaaaagactccatttaactttgatttgggaaacatttttctttgcatgacccagcaattatgactctgaacccagagagggaaatataaccctaactcactgttggccaggcagtatacaatatttatatagtcacaatactataaactctatgtgtcaattttctaattttagagccaatctgtggacaaagagggagcaattttgttatagctgcaagataggatataaatatgaacagccctgacaaagtagagataaaagttgttcggtgttttttaagtgtgtctaatataaagtgagaggggaaagcagggacaaagatgaaataatgtggggagttaaaggatacggtgtgtggttgatggaataaaaaagctcactaggtatgttatttacagttacaaaataaaatataaatagcaaatgttggaagaagacacagggtagaagagggtaaatgtccctcatagtgaatcaatggatgctaccttaggttaagaatcttttaacccctgattcatcaaaagacatgaagggaatcgccagaaaatattaaaagagaaatcccaaaaagggctgctgcccctagggaatggcggagggtgggggtggggagggcaggaggttgttgcttttcatcagaagtcatctgtgttgtgtgctttattatgatgtttattacttcgattaaaacaaattgaggcagtgagagaatgacttttaaaagacaaaaactgtggatagtaccatatgttccctcaacaaatgctctcatgagaattagctataaaacactcattaggtctgcaaacagaaatcagagtgttccaggctataaaattatcaatgactgttttcagcagtccagccaggctaatgctctccaatgaagccaaactaatgttgctgataaccaaaagaatctttttttttttttctgtaaatgacagaggcctgtgtggcatcagggtgccattaacgttttctcctagagagacagccaggaagaaaaatcgctcctcctgtactgctctcacctgtgagaagtttatgacttgttcggagagcagagcacagagcccgggaagagtactggcagtttctgtgtttttacaagggaagaacatagctgagtagattaacagtttcctgtgtggcttgttgcaaattacatgcaattagccctcagacagcctgaatcgagagaattgtggcaaaacttgatggtgcagaacctaggcaggcagccagactcctaaacccagtcacgtaaatttgctgctgtaactggatcttcccaagccacaagtctgagaaatggtgggcactctgacctgaccactagattttcaggatattcctcctaagagaggtatccttgcttctaagtgacccctaaaacagaacctaggaaactctcagccagataaattagaaattgattctaaataggcttgtgcccaggaaatcaacaatgcagtaaaaatatcaggacaaaagcaagaatacttcccaaagtcagaaatgaggagcaatgaatattaaattgatcaatggcatagacatttaaatgaaaatcctttttttaaatgtatattactggccaggcacggtggctcacgcctgtaatcccagcactctgggaggctgaggtgggtggatcgcccaaggccaggagttcaagaccagcctggccaacatggtgaaaccccatctctactaaaaatacaaaaaaaaaagtagttgggcatggtggtgcgcacctgtagtcccagctacttgagaggctgaagcaggagaatcgcttaagcccgggaggtggaggttgcagtgagccaagattgcaccactgcactcaagcctgggtgacagcgagactccatctcaaaaaaaaaaaattatattacctttactgcttggggcatcttcaagagaagactttgctgtagactatggatgcatttatttgaattagatgacttattcttgcgttatctccttactcttttgataattacatttcattattttttaagccacaatggacatgcacatacatactcctgcatacagtttataggttcttgagcctaggtaagactttatgtcctatgtgaaacatttcttgattaggaaagttacacctttctcttcagtagtgcatataacctttactaatctctctttgctaaaaataatgtgacagtgttaaactgaaatatttttagtatctgttttggctgaggcccaaaacaaaagtaaatgtgagactatagcacttgcaaaggtcaaaactggtttttgaatggcagaaaatcagctctacagccctcagctgactacccacctccagcctttaaaagaggttattgaggccaagaaaagagtggcagttagaatgtgatctttagagagaactgttgatcagaggtgtctgtccccacccagggacacttgggagggcttgataagtgtcctgtggaggatgtggctcatgcctgagatcctatgatggcagagcaaggagagtttgctgtttggagttggcttctgctactcacttcctatcttttttctgtgtgtgtgttttttttttctccttagcacttttgaccaacataatacatattttaaatacttatctcattgtctgtcttctttaatactatgtaagttccatcaggcacagacttttaaaatttgatctctgtattctaggtgctagaatccattctaggtgcagtgtgcatacatggatactcaataactatttgcagctgggagcagtagtagctcatgcctgtaatggcagtgcattacaggcctgtgtggcttgttgcaaattgtgtgcaattagccctcagacagtctgaatcgagagaactgtggcaaaacttaatggtgcagcacatcggcaggcagccagactcttaaactcttggcctttgggatgataacttgagcccaggagtttgacaccagccttggcaatatagggagacctcatctctaccaaaaaaattttaaaaagaaacaccaggcatggtggcacatgcctttagtcccagctacttgggggctgaggcaggaggatcatttgagctcaggagtccaaggctgcagcaagccaagattgcaacactgcactccagcctggatgacagagcaataccctgtctctaaaaaatacaaattaaataactaaatatttgcatcctacattcattaccacaaatcactccaacaaccctactcgttctgtattattattctcattttacatatgggaaactggagctcttactcagaagggttaagaaacttacccagtatcacatacaactaagtccaagagccagaattgaaagtcagattcatctgattccaaagcttatgctctgcctgttaatgctttctcagctcaggtgcctgtttcctgaaaatgtattctcatccttttttgggtgctaggtagtatctaatctaagatttttaggcaagtaacatgccattctgtgctgtggtctcacttggtagatcctgcataatgaggataacaaatagaaagattaattaattggttatgtagcttacactcaataccaagacaataataatttcagattattcagaatacatttaatggtactttactgtataaatgcctgattattcatttagggctgtatattctcccaaattcttttatatgtataatttggtttaaatattaaattgttggaagcttaagtagcattattttcattgttcaatcttaatatccattgttttaaatatgttgttttagaaagcatattttgcttacttttcctcaaaactttctgttcattgttactcttcccaaaagaacaaagatctccacagctaacaccaaacatcatataccatatttgtttttgtgggtattctgtaattattttcaagctcctaggcacatttgcgtacactacttttgtttctgcaatgacaaatttctaaaatgttagcagcaatgactgtaaaaaagggtagttaattggaaaagagttcagatcctaactctgtttagggaccatgtaacccaggcaagccgctgcacctccctgggcctcatcctggaagtagagatgttgggcagacacatggggagggattgcgtgtatgagtgtaacaggctgggtgggatgctcgagtgaggtggggaccctgcagcaatgcagaggacatgctcggtctaaggaaggcagctgcaatctcactgctactcagaaatgtaggcttacagttggccactcttctcatgtctcaaaagaaactgggtttttgtgggaatttccttttcctcaatttggcaataattcaaactaaaatctcttcttctttttttttttttttgagacagagtctcactctgtcgcccaggctggagtgcaatggtgcgatctcggctcactgccacctccgtcttccggattcaagcaattctcctgcctcagcctcccaagtaactgggattacaggctcccaccaccacgcctggctaatttttgtatttttagtagagacaggattttgccatgttggccaggatggtcttgaactcctgacctcaggcgatccacctgcctcggcctcccaaagtgctgggattacaggcatgagccaccacacctggccaacakatctcttcttcaaaacagttcttccagccagactgggtttgtgggacagcagtgtgtaacctctgggcaggacatccccaggatggaggtgctctggcccatgcctgcactataccagcatgtgccctgggacattgcagatggctccccaggcctccacgggcctgcactcacagtctcttcaccagagagctcgaaatctcagaacccaactctctcatgtcatcaagccagagacatgagtctgcttttctgtctccttagatttgtctgttcttagacattttgcataaatgaaattatgtaatatgtggtcctctatgactggcgtctttcacttgscataatgttttcaaggtttcctcatgttgttgcatatatcagagctttattctttttattactgcataatattccattttatgaattatttgtccattcatcagttggtggacgtttgagttgtttccactttctggctactatgaataatgctactgcaaacattcatatacaagtttgtgtgtggacaagttttcatttttcttggatatgtatgtgggagtggaattggtgtatcatattgctttgaggacagaccaaacagttttctgaagtagctgtaccgttttatcaaatacattcccatcagcagtgtatgagggcttcagttgctctacctcctctccaacaagtttaatttttctgattttctatgataactatcccagtagttgtgaaagtggtatctcactatagttttgatttgcattttccttatgactaaggacattaagcatctttttatatgcttattgaccattcatgtcttctttggagaactctccagattctttgctcatttttaaatttggttatttgcctttttattgctaagttataagagttctttatataatctggatacatgtctcgatgagcctcatttttgtcacccaaatttaatgatattcaaaatattctacttactaagataggaaactattctgtttgaaaaacagtataaataacaacgttttaaaaaaaagaaagatgcccatttgattttatcaaattttgaccttatgatactactaagtaaatctgatatttcttttttctgtaatcatactatattttagctgaaataattgataaatatacctgtcaagtctcaaataatattctaattaatttttgtatgttaattttgtcttaaccatgccagtggcttactcatagcttccaaaaataaaaggtaactcttagattgaaaaatactttcaaagtgggtgggtttgcctctagggaggagaatgctggatcacaagagggcaggagaaagagaattactttctgctgtattttacacttatatgcatgtagcgtcatttaaaaaaaaataaattttggaggctgggcactgtggctcatgcctgtaattgcagcactttgggaggctgaggcgggtggatcacctgaggtcaggagttcaagaccagcctggccaatatggcaaaaccccgtctctactaaaatatgaaaattagctgggtggggtggcatacgcctgtaatctcatttactcaggaggctaagagaggagaatcacttgaacccaggaggcggaggttgcagtgaactgagatctcaccattgcactccagcctgggtgacaagagtgaaactctgtctcaaaataattaattaattaattaatgttggggccaggcgtggcggcttatgcctataatcccagcactttgggaggccgaggtgagcagatcatttgaggccagcagttcaagaccagcctggccaacagtgaaactctgtctctactaaaaatacaaaaattagcagggcgtggtggcaagtgcctataatccctgctactcgggagcctgaggcaggagaatcacttgaacctgggaggcggaggttgcagtgagccaagatcatgccattgcactctagcctgggcaacagagcgagactccatctcaaaataaataaataataaaacataaattttcagcaaaatttaaatgtggactattgtattagtccattttcacactgctgataaagacatacccgagactgggaagaaaaataggttttatggactcatagttccatgtggctggggaggcctcacaatcatggtggaaggctaaaggcacttcttacatggcagtggcgagggagaatgagagaggagcaaaagcagaaaccccttataaaacatcataactcatgagacttattcactaccatgagaacagcacgggggaaaccacctccatgatttaattatctcccaccaggtccttctcccaacacatgggaattatgagattacaattcaagatgagatttggatggggggacacagacccaaaccatatcaactatagattagatcatggtattatatcattttacatttcctgatttcgataattgtactgtattatataaaaggatgtccttgtttttaggaaattcacactgatgggcttatgggtaaaggaatgacttgtatgcaatttagtcttcccaaacagttyagggaaaaaatgcttatgggtatttataaataaataattacaaagcaaatatggtcaaatgataggaagggtatcctggacttttcagcattccttccctttttctgtgagtttaaagttatttcaaaattaaagtttaaaaaaaaatttaaaagaaagacacttccggaatattcttttatatataagagcttccagaatattcttttatatatttgatatatattaatatatttgatacacttaatattaggaaagaaataaaaatcayaaataaaaactcaagaatggaaaaacttagttgtttttttggggtttttttttttttttttttttttgagatgaagtctcactctgtcacccagtctggagtcagtggtccaatcttgactcactgcaacctctgcctcccggttcaaatgattctcctgcctcagcctcctgagtagctgggattacaggcatgtcacccattcccggctaatattttgtatttttagtagtgacaaggtttttttttattggccaggctgctgtcgaacttctgacctcagatgatctgcccgccttgcgctcccaaagtgctgggattataggcgccacccgcgcccagcctctttatgacttttgtaatcaggaaaaatacaagtgaaccttacttcttaagatctacacaatttgttgcgcatggtggctcatgcctgtagtcccagcattttgggaggccgaggtgggtgaatcacgaggtcaggagtttgagaccagcctggccaacatggtgaaaccccacctctactaaaaatacaaaaattagcgggacgtggtggcgggcgcctgtaatcccagctgctcgagaggctgaggcaggagaatcgcttgagcccaggaggcagagattgcagtgagcgaagaccgtgccattgcactccagcctggctgacagagcaagactccgtctcaaaaaaaaaaaaaaaaaaaaaaaaaatccacacaattcttttaacaagttttttttttaatattaaaaaggtcagggcttttaatatttcacatatcttcaattaataggtamatatgtacaaagacaggattatgtgcagttcccaggttcccagacgcgggaaagacagagattataatgtcctcagtggcctcctgttcagcttggaggcttagacaggaacctcagaggatgcctttagatggggagttttcagaagaggtgagctctgatttaaacctggaaggggtcgcagaggaagaggagagatgaagcccaccttccccagccctgccctcagctctaccacccagggaagaccataggctgctgttggttccctccacatggccaatggccagccttctgccaactctcccaacaccaatatcacactcttctccattttctttttttttttcaaatattttgttccagcaaaaccttcccatggcaaatttccacaggttaaaaacataactttgattttaatggggaaaaattttgtatatccatgagcccctaaattaatacccaattttaacactataaaaatggagcaagctgggcacagtggctcacatctgtatttctggcactttgggaggccgtggtgggtagatcacctgaggtcaggagttcaagaccagcctggccaacatggtgaaaccccgtctctacgaaaaatacaaaaattagccaggcatggtggtgcacacctgtgatcccagctactcgggaggctgaggcaagagaatcactggaacccaggaggtggagattgcagtgagctgagatcacgccactgcactccacagcctgggcaagagagcaagactccgtctcaaaaaaaaaaacaagaggaccagttacttcaacagtttcaacagttaacactggttatatcacaacaaaacaatggtggcttctcttcagatgactctccaatatactgtctacctgcattcctttggcttttggtattgtcgtagttactaagggtgtgctccagctatcctcacagaggacataacacagtgctctgtgtttatgtggttcactgctactccaagtgtggtccttgaaccagcagcgttagcatcacctgggaacttgtcagaaatgcaaatccatgggctctatgccagactctggctcagaagctttgtgggagggatccaagaaatttcattctaaccagcccaccaggggattctgaggcacatgtaagtttgagaaccactgatgtaattgaaaaagaagaaaaaaagagtaaaaaggggaaaaaaagaaaaatcatcagtgctaatgatgcacaaggttatcttttgtaaactagggtagtgtaaatactgtaaattgaagcagcaagaactaatcattcaaagtcaaagataactaatgagcccctagattcacatcctcccaccactcacaaggcatgggacccacagatcccctctcccaaatgcaatgaggtatctcgtgtgctggtagagagagaaaatgcacttctagtaaaactgaatactatatattttttttttgagacagagtctcactttgttgccgggctagagtgcagtggtgcgatctcagctcactgcaacctccrcctcctgagttccagtgattcttctgcctcagcctcctgagtagctgggactacaggtgtgcaccaccacacccagctaatttttgtatttttmgtagagacggggtttcaccatgttggccaggatggtcttgatctcttgacctygtgatccgccggcctcagcctcccaaagtcctgggattacaggcatgagccaccgcgcctgggctaaacccaaactctttaaactcaagtgaccatgtctccaggcataaccatatttccttcaaattctcaaaattgtttatccccaaaagctgcccacctcaccctctttaggactttggaggtgtctttagattttgttctgggggcctcatgcccatcattcatctttatttttccagcaaagggttaccttccagttcaacatttaccttggaagaggggaccatctacttgaccgctgagcccaacactctggaagtgcaggatgacartgcttctgtgcttgacgtctatttagtaagtaattttttagtttcctctcctccacttctggtttgtaaatggatccaggccatggcttacacaagaacaagttcaataaaaccaggcatgcttgggttttaaaagaaatgatggcgccctttcacttctgcaaatrgtgcttcttttcacaagcaatgttttcctacaatttattacacaaaagaacatctaggtcaatacgaaatcaccacgtataacaagagaacgaatcctctaatgttgaggcaaagtagggctccttagtgttattcccagcgaggaaatgtttccctttgactcagccgtgctccctgatgtttgaatcttctgtgtgttggcgttgctcccttggtaagttagtaggccgagaggckyagaactgggtcatgggaagaacccaaattcagtgctggagaatcttggctgattctctcctcagttgtcaccaaccagctgtgtgatttgggaaggaacctttctgactgcctaaggagggaaataatgcccaccctgcctaccttacaaggctgctttgaggatcatgagtgaccctttagtgcctgtcaaattacctgtatcagcttaatcgaactgttagataatgcctagaaagataccctgatgggctacactgtaaaagagtattttctgtgccaagtgcatcttgcatgtatgctacgtctttgtatgcctgcacaaaaaaaaattttttttgggggggggcagagttttgctcttgttgcccaggctggagtgcaatggtgcratctcggctcaccgcaacctccgcctcccaggttcaagcaattctcctgcctcagcctccctagtagctgggattacaggcatgtgccaccacgcctggctaattttgtatttttagtagagacggggtttccatgttggtcaggctggtctcaaactcccgacctcaggtgatctgcccacctcggcctcccaaagtgctgggattacaggcatgagccactgcacccggcctacctgcacaaaattacataaaacaggggaagtgttcttttggaattttctgggtttttttaagttttgctaaacctgagccaatactctgtgtcgctcctggtgtacaagtgcaacttcaggaatcagcaccgagtgatgcatgtctcacagcagctccctgagcctccttgagcctgcattttatgcttttccatatccctgacctagcactgtaattcctcacaagtgctctgcagggcatcagtcacctaagatgctactcctagcaatactggagtagtatccaaagtcctggccaggcatggtggctcatgcctctaatcccagcactttgggagtctgaggcaggcaaatcacttgaggtcaggagttcgagaccagcctgaccaggatggtgaaaccccatctctactaaaaataggaaaattaggcaggcatggtggtgcatgtctgtagtcccagctacttaggaggctgaggtaggagaatcacttgcacctgggaggcggaggttgcaatgagccgagatcatgccactgcattcccacctaggcaacagagcatgaccctgtctcaaaaaaaaaaaaaaaaaaaaaaaagtcctggctgggcgcagtggctcacgcctgtaatcccagcactttgggatgccgaggcaggagcatcaggaggtcaggagttcgagaccatcctggctaacacggtgaaaccccatctgtactaaaaatacagaggaaaaattagccgggcgtggtggcaggcgcctgtagtcccagctactcggaaggctggggcaggagaatggcgtgaacccgggaggcggagcttgcggtgagccgagatcacgccactgcactccagcctgggcgacagagccagactccgtctccaaaaaaaaaaaagtcctccaggccctgcatggtctggtctcccctgcatctccgacctgccccctccctgggtctccctcttccttgctgatgctattctagccacactggcctccttggtgttcctctcacagaccaagcacatctctgccttgggacttttgtgtttgccattcctgtctgtgtattcttttccacctatcccatgctccctcacttccttcaggtctcagcccaagtacctctttttcagataggcttttcttgaccgccccctacgtaaaacagcaggtcccccaccaaccgttgtaaaaagattttttctctgaatatcctagtttttgcataaacaaatttttttgcactgagcaatgctccaccctaccattgcccccgctttaaaaaaaataagattgtagcagatcacaaaatccttacagaaaagttggtccacccccaaccaagaaaatggggaattaaatagggaaaaaaatacatttttggtcccatgttggattcatctggaaccagaaatcaggaaagcctttcagaaagaagctaagtaaaatctcatcttcatgagctaaggattcatgccactttcatgtgtctttacaaaaactagattttcaccagtcacggaggtgcaatattcctaagtgagccaaaactcaaattcagctccatgtgtggtcctgcctaaacttgaacccaggagcaccctgttgttgttattgaccataaatataagtctcacgtccatctcattggaatcatgtgtcttacaagagtgagggaaggatacagaaaggaaggaatgagggggttttattgagaatattttttgtaaaattctttcactgttttttcctgaattttttttttttttttttttgagatggaatttcactcttgtcgcccaggctggagtgcagtggcgcgatctcgactcactgcaacctccacctcccaggttcaagcgattctcctgcctcarcctcctaagtagctgggattacagggacctgccaccacgcccagctaatttttcgtgttttcactagagacggggtttcgccatgttggtcaggctgattttgaactcctgacctcaggtgatccgcccgcctcggcctcccaaagtgctgggattataggagtgagccactgcacctagccaaaattgtttaagtattcattaatttaaaacagtaatctattatatgttaaataatgtttttatgaatattattatattttccaaaacaaaaataaattttgtgagaaaggtggcattcttttatatttctgcaaatccctaatgtctggcttaatggaagaaaaaagattctcacatctgtttctgtatctgtcttcttgatatatataacacatcatttcatttctagaaagctccatcgtacatccatgaaagggaatgagaataaaaaggcaaacaacatctttgtattattaggaaaatagtttgacctcatggacccccagaaatgatccctacagagtttttctcatattttaacttagtctcttcacctgttgcaaaaccaagtgaagcataaattaattagagacaaataggcacctggagtctgtgctggtctctgcctctcattaatcgtttcccttgaattcagtgatctcagttttctcatctataaaatgaattattaaatcaggttcattctaaattacaaagagatatagaaataagattttccaaggtgggaagattgcttgaggccaggagttcgagaccagccaaggcarcacagtgatacctcatctctacaaaaattaaaaaaaaaaaaaattagccatgcttggtggtgcatgcctgtagtcccagctacttgtgaggctgaggctggaggatccctcaggcccaggagtctgaggttgcagtgagccatgatctagtcactgcaccccagcctaggcaatggagtgagacatggtctctaaagaaattgaaagaaaagaaagaaaagaaggaaaggaaggaaggaagggaagaagggaagggaagggaagggaggggaggggagaaagaaagagagaaagaaagagaaaaggaaggtttccaaagtatctaccgttgtttctccaaattttgctgtttaatcacctcctgtaccataaactttcacattctttaaacttaaattttatggcagtacatctagaaagtcctgcaccattaacttgtaattccagaatgtgttttcatgctggaaaattttattttttgttttgcgtgctcttctagatcagaaagggtacagctcattgccctcccttcagtattttcatttgcatctccatatgaaaaagcaaatggaggccgggcacagtggctcatgcctgtaatcccagcactttgggaggccgaggcgggcagatcacctgaggtcgggaattcgagaccagcctgaccaacatggagaaaccctatctctactaaaactacaaaattagctaggcgtggtggtgcatgcctgtaatcccagctactcaggaggctgaggcaggagaatggcttgaacccaggaggcagaggttgcggtgagccaagattgcgccattgcactccagcctgggcaacaagagcaaaactccgtctcaaaaaaaaaaaaaaaaggaagaaagaaaatggaaaagaaaagcacaagaaaggaaaaccaatcttgcctttgcattgtctcttttttccttttgacataatttgagtgctctgaatcacagccatctttatctgaagggcagttggaagcttctctagtgacttcctgtacagtgttgtcaccaaacgtggtcaggtttctcttgtaatgcttcttctcctttaagatagcatttctctattagtagttgtagcctaatcccctagtgcttttatttatacagtaatgtataataccatttacctttgtgtaaaaatacataagtttaaacccaaatgacgtatgcccaccagataacatatgaaatatccttttaaggatccatccacacattatgtgtgtgtgcattaggctagctctcctgctttttcctgtaactcaacatgaaattaaaaaggattggtgagttgaaaaggcagckaattgttccatcatccttagtgagacatttagttcagattttatgtatctagttattctgcatggctttttaaaggccattcaccttcacactgtagagtcccaagctatttgactcattttcaaatattcaaatcaagggaagtgttttctaagatgatttttatccagtgaccaaagatgtgtttttcattgaattttgagttgatgacacagattagggtatttaaaagaatacacagagatgagcaggctgtattgatttaaaatgggcaatcacgcagtcttcataatagagcaagattctactttgtaaatagtcccagatattctaaggcaccggatgctgtcacagtggctgttatttccgtttctaaggcggcttctttgcctgatgtagaatgcaatttggttttcgtggaaagaggaacaaccaacaaaaagccatttctgctgaaaagtgtattgggagagaatatccttttatgactagctgggaatggctgggtaagtgggagataatgggattgcttttttaataatatagaagtttgaaagatggctgccagaaaacagtgacttccttgcttctactattcatacccaaggttatgcccttacactttccatattaacatcctctcaataatatgtactttcatccagttttgcttctctgcaaaatggctgtttgaaatacaaaaatagctgtgagcaaaggagaagaaacagttaagctgttttttagccacgccagtattggagattagcgctctgatgggcagctgttggacggcttgattatttaatgtgttttcagggtagttaataatactctttgatcatgggaagaagggtggcagagaagtgaaaatgattgaattaacagcttatcatactattatgtatggaaaaagcgtgagaaagagaagaaaaacactttaaattaggtcacaggggtcttagaaaattcagtggaacttttttggcaaaagaaactgcatttctggatttgaatccctcagcgttgaggttaatgacttatattgggtctctttaatcattccttgttggagccagtatccgctgcttcaaggggtgtttatttgaaacagtggcatttcttattccttctcaggagagaactcgatcccctaccaaccaaagatgctgctcgggtttttggtagattttagtgagagcagagtaggaaggagaaaagacaaacactgcgtttggtgtagaaggcatttgaccagaagcccctttccttctgccaggtgatcacattgttgagaagtgaagagattttggaaaggataaattagggcccttgtttgtttccagaaatgcttggcccctaagttattgacaaataatatttctaagacatgtggaagagctgagaaaatggacctcccattgcccgagtctcacagcatctacaagttattcccattcttgaaataaaagtgacgcaagcttcaaattaatgaggcaacctgtcagtctagattaggaggtcacccataggatttttttaaaaaacaaacagcattaaactgctgtttaaggattagcgtagggaattccagctggagttataaaggcacactggctttccagttcaattaggctcagagttagcaattgaatgacagtttgcagggctgcagtagctttttttctytttttttttctgttaggtcctagctttacagtgaatcttggcttgcaggctagcttgatttctactttctttttttctttttttcttttttcttttcttttttttttttgtttttcagacaggatatctctgttgcccaggcagaagtgcagtggtgcaatcttggctcactgcaacctccaccttccagattctagtgactctcctgcctcagcctcccaagtagctgggactacagactcacaccaccatgcctagctgaatagagatgaggtttccccatgttggccaggctggcctcgaattcgacctcaagcgatccgcccacctcggcctcccaaattgggattacaggcatgagccactgcacccggctgatttccactttcttaaaagctagttctgctccagtttgcctgggtcttttattattatacatccaggcgcgggttgcccctcatttttcattcttttcctcctaagactggcctctcttcccttcccttatccctctagactcttcctattgcttctctttgtggtttctatttttgtcttccttgtcagagaaagccagtgtttgccattttctggaaactttccaactcttgggaatagtgtttgaggaagaacagcctgtaatggtgtgaacttggggtctgcgaggccctgagcctgcagaaaacaaacagcagacttagaaagaaccagattagaacaaacaagaacttttaggaaaacaagtttagatcacacccatggacctagtaaacaggactgttctcattcgtgccatttccccttctgggctctgagggggaatgggaaaatgcttaaggactattcggtttataaaaaataaagccccccaagtgtgatgaatggcacgagtaggagtaggcagctgagggcctggcttcccgtggtctgcttctgcctctgctggtttccaaggcctgctatcacaaatgaccacagacagaaatggattgtctcacagttctagaggccggatgtctgaaatcaaggtgtcagtagtgccacacttcctctgaaggctccaggggaggatccttccctccctcttttagcctctggtggctccacatgtcccttggtcctttgatctgcgtcactgctgccatgttcatatggccttcttccctgtgatgttctgtgcctctgtgtggcctctcttcttataaggatgtcactcatttgatttagggttcaccctaatccagtatgacctcatcttaactaattacatctgcaaagaccctatttccaaataaggttacggtctgaggctccaagtggataagaatattggggggacacaattcagcccacccctctaccttaccgagggacctgtgaattaactgctccttaccacacatagcctcgttttcttgttcacttcccttctccctggttgtcactgtgacgttaggtagatgtttccaaattagtttgtattcctcacaaagaggtatcaggtaaatgactatatgaacagagtcagtcacctgttggggacataatttgtgttcgaagtaaaatccctgggggtggactgaggcattggtattttttaaacctctacacacaccagagctgagatcccctgagcttattaacagggtccttcagctctgagcatcctggaattcttgtatgctaatgtaagggggaaccgtgtgactcccctggcaagatagctgtcccattacacgtgcctctaatgtagaagcaaagcctaggaagctcctacaccctcaagtttatgawctgggcttgccaatgagttcctgctttcagcaagccctctactgccacctactgataatcaaggcggggaaggagtgatggagcccctagagttgaaacgtaatgaagagcaagtgtgtgtctcaatggagttcccactccatgtacttgattgtagcctttcagtgttgtacgtgcaaggtcagcaggcggcgggggtatgtccttcagaggtcaaaggcagcttactctgacaggcccagctccaccacctttcaagttggactggaggctacaattacaatgtggcgcaaaaatgaaggtgttaccttccctcaggtccaagtgtgcccccctcatccatcaaggccagttctgcttgagcctttttgaaaggctcccttggcagattgggattcaacacagaaaatgcttctttctactgtttaggcagcaattttaacaaagtatcaacaaatctggggtggagaaagccattcttcaccttcggtcttccacaggtcctcgcctacagccatggaactcccaggtgattgtggcttttgaagtaactttagtagagaacagaattaaatataataagataaaaatatgtggggtttttttaaagacttcctaaatcccagtggttgctattttattagttttctagggctgctgtaacaaagtaccccagatttggtgtcttgaacagaaatttcttttcttgtcattctggaggccagaagttcaagatcaaggtgttggcagggtggattccttctgagggctgtgaggcaaggatctgttctagcctttcgctggtttgtaggtggccttcatctccctatgtcttcacatcacatcttccccctgtacgtgtctgtatccaaaattcccctttgcataaggacatcagccatattgaattagggcccaacctgtggcctcgttttaatctgattacctctataaagaccctgcctccaaataaggtcacattctgtggtgacaacagttaggacttttaacatagaaattttaggggaacacagtttagcccgtaacagctacttgggtgtttttgtaaaggaaaatgccrccgaggaaagtgctgagatggaaaaggcttgatgggrgcacaacttttttttttttttttctttttttgatggaatcttcctctgtcacccaggctggagtgcagtggcgcaatcctggctcactgcaacctccacctcccaggttaaagtgattctcgtgcctcagtctgctgagtagctgggaattataggcgcacgccaccacacccggctaatttttatttttattttttttttgtaatgacagggtttcagcatgtgggccaggctggtctcgaactcctgacctcaggtgatccacctgcctcggcctccccaagtgccaggattacaggtgtgagccaccacacccagcctgggtgtgcagcttctaatttccaccctctgggtcttggcagagggcctctggtgcattccttcctgtgggtgagagagaagccagtggcgttgtcctcaggcagtgctccttttcaaatgaaaccagtaccatattcctccccccacatttttcaaatgtggctgaagcaggggtcagagtggattgtgttgcagcaacagatctatgtgatgtgttagatgataaggtgtatcagtccattttcacactgctataaacaactacccaagactgggtaattaataaaggaaagcggtttaattaactcatagttccacatgactggggaggcctcaggaaacttacaatcatggcagaaggtgaaggggaagccaggcacatcttacttagtggcaggagagagacagaagtggcaatcaccagacattttcaaacaaccagatctcatgagaactctgacatgacaacagcaagggggaagtctgcccccatgaatcaatcgcctcccaccagaccactcccccaacacatggggattacaatttgacatgagatttgggtagggacacagagccaaaccatatcatgaggtaaccacccagatttacaattagcaggagtcactcaagtgctgaaaagtccactgcagaactgtccaccagtataaatcactgatgctctcaggcttctcttgggtccttaggaaacaaattaatcagtcagggagctgtgttaaaatgttaccacattaacagttttgaaatgagaggccaaatcttaaatccatcccaggagacggcacagacgagtgtcagctgcgtcttgggtctgctctcaccttatggctcatctacctgctgcttagtgtgggatgctttaatgaggcatctggaggccggcaggaggcctggcactccatgtgctgccaacaccccagaattcaaccaacagtctaccagatcwggaacaaaatagctgtcttcatcccaattgtacacatccttcaaggatggcgaaagtcctgccttctgcctcaaggcttctcggttgaagccttgtagtccctggtccttggaagagagtaacktcacctctaatgctgmgtccaaatatattttttaagtacaaaggtaggaaatttggayctgagcgtgcctaagtttcctttcggcaatgcagttccatagcactgtgattttcttctgttcacactgctatgtcctgattctgcagcactagcacgtgtatttgtttccatgcctaacaaaatggtgagcttttgggtccctgctactactggaatccaatacaacgagaaatcccccactgcactacatccccaaatgattgtgccttgtgaagtaattcccaatagaggatagatatgaatataataaaatatagagctttatttaaaaaaaagagagagagagagactctggacttcccagaacccaaaggtgataccttgtgtttaaaacttagggatctcaaccaggcatggtggctcatgcctgtaatcccagcactttaggaggccgagaggggcccatcacttaagtccaggagttcaagaccagcctgggcaacatggtgaaaccccatctctactaaaaatgcaaaaattagctgggcatggaggcgcatacctgtaatcccagctacttaggaggctaaggcacgagaatcacttgaacgcaggaggcggaggttgcagtgagccaagatcatgctgttgctctccagcctgggtgacaaagggaagctctgtctcaaaaaataataataaaataaaattcagggatctctgggaaagaaatcgggtgaacccagagatgaaggggaccccggagccaaggagatgatgttggggtgagatatcctgagccttaatatggatttgtggtgatgtgtgagttttgactaacgtgggcagagggaggcgggatgagttgatgtgatctcatggcaaccagaggaacatcagacaaaagaatcaggacaatagaaatagaaaggaaacagagcagacctggaaaaaaagagaattcagaattgatgacagaaacaggagctgtgtgtaggaaaatgaaacacgggactaagcctacgatggccgaaagaaaagctgatgctttcgtcaaagatatttgggacaaagaatttcaacttgaaaccaaagtgaggatttcctggacaccagagaaagctcttgctttaataaggcctcaggactgaaacctgaggtaattatagttaaaaaaaaaaaaaaaagggggggatatcaccccaagggttgactgctcagggatcatggagacctcacaggacttgtcagtgctgttcatcttggccaacctaactgtggtgaagttccgcctctctcagcactgccctaaaactccctcacaccacatcccagatgttcagaaattctcgatatgtttgtaagccagtcggttgatgggggcaagggtgtcaagggaaggcttgagaaaggcaagcaggagtggaaggaatgagtctaggaaaaaagtttcttggaaaagaaactcctcaccttctcatgcccttcctgtggctctgaaaagtaaaccgaggccatctgagttgggaagccctcctgggagtgtttcctgcctgggctcccctccaggggatccgacttcacagtacagtcagccccctagaaagggcttctgggttaattagtggacagattgcttttgatttgctgttttcccttattgctctgtattagtgtttaattatttaattttaaataactttttaaaataaatgttgaaaattatttaattgtaatattgaaaagctttgtaatctctgaccccttgtgtacatactattgtgtagtttcaatcatagaatcaagcattttattttaggtagaaataaaaatacacctttctctttcttataccccaacatatgtgtgggatgaataacactgggatttaggctgaaatactctacttttactttttatggcaactattaacgacactttttactgtcaggtatcagaattttaaatagttcatgaattctcagagtatctcagtgcataggcaaaaatgctgcacctttgtgggcgtgtgtgtgtgtgtktgtgtgtgtgtgtgtgtgtgtgtgtgtgtgtgtgtacagaggttcacctggggacagagctgaaatgtcactccagggtctgtagtctctgagctcctctgccaaagcaccagcrctgagagggaggaacttcaccacagttaggttggccaagatgaacaacactgacaagtcccgtgaggtctctgatccctgagcggtcaaaccttatttcagtctctacacccattcggtcaggatgggtctgaatcttggttgaccttgaggagaagctgctaatcttttgggcaataatgccctgaagagtccatctgcktgctggggagcagaagggacttctgcgtgtaccacactttgaagaatgagctcaagctatgagttagtttccttccagggtagagaactgatgtttgtgtctctgcagtgatggctaatataggactcctgagttatgaatttgaaggaaggaaaattatggcaccttttatgctaaggaaggaataataaaatggtttctgcatacttctcactgtggccatgtttacaagcaagaagacgctgtgctttcagatcccacagatacctctccatctcattttaacagggttataaattaatgcaaaacagacacgttcatgtatccagatcatgtcatccaagaattacattacaacatgggtggagagttggcagtgctcacccaattttgacattcttgagccctgagggtgagagtgagtgtttataggagcttatagaaacttctatgacatccttagtttaaaaaaaaaaaactaaactaaacttcctgtgtgcatgcaaaggacattttatgaccaaagctggaaatcattctttatttttaatactgaggagagtatcttttattattataagaccctgtgtgtttttttattaaactataaatttaaccaattttatgagagacatcaaggtattaaattcttttcagatcgttcccgttgcataagtcaccaactgtttacagtattctgagttattcagtggtataaatttacagcaatttattttattttattttatttttgatatggagttttgctcttgttgcccaggctggagttcaatggtgcgatctcagctcaccacaacctccgcctcccaggttcaagcaatactcctccaagtagctgggattacaggcatgcgccaccacacgcggctaattttgtatttttagtagagacggggtttctccatgttggtcaggctggtctcgaactcctcccgacctcaggtgatccgcctgcctcggcctcccaaagtgctgggattacaggcatgagccaccacacccggactttacagacaatttttaatgggatcttgtggttgaaacagaacttcatagtcatctggcccaagctacccacaagtgcccaagtcctctctactgtgccttctgggtgctgggtcaggataaacagtttctgcctcagctctcctggggctgatccctaagtgacagcaactgctccttctttagtgaccactcatttctttctttttttttttctttagagacagggtctctctccgtcacccaggctggaatgcagcrgtgtgatcatagctcactatagcctcaaactcctgggcttaagcaatcctcccaccttagcctcctgagtagctgsgaccacaggcacatgccaccacacccagctaattattttattttattttttatttttgtagagacagggtctcactatgtggccaaggctgttcttgaactcctgggctcagccccacaaagtgctgggattatagacgtgacccatcatacccagcccactcattttttttactccggttaaaaagcacttctagcttgagaaaaaactggcttccatgcagttgtcctgggttctggcttctgggatcattctcaaccactgagtctcagcagatggcatgctgggcccttgtatctagggagggcttgcgtcatgtacacatgacatgtgctgggggaggacataaatttcaggatccttaatgaagaaagagtggagggggtgcagctttacaactctacgcccttcacacattctgagattccactcacctcccgaccccaggatcacagcatctgtgccactattgctggtgacagtgtcacatctttcagcaataccgggactaaactaatacctaagcctttcttccctgaggctagtcttcagagactcaaagacaactattatgccctgtctctacctctcctattttctagaccaaaaagcccaggcctttagccattcccctggggtcctggctccagggcccttcactggtggatctcctcaggcatcactcaggtgatgtacactgtccctctcagagtctggcactggaagtgagacacagaactccagtgtgatctatagaaygaggaaagcaaaactatcacctctttttgtttttattctgctttgttttttaagaacgcaggacttctaaatctaatcagtaggacctcatcattttatgtgggttgttttgtatgtcactggttttgtgagagacctgcaccatacatcaaagttatcagactgaggctgaatgaaatccaccagtccaccttaaagacagctatcctgggaatgtgggcaacgtcccacttgmccactgctatagcttatagcaccttacactcacctcttcctacagattatttttgagtaacagcgtgaccatgttgtgcatttagccaagcaaacctttctagcttaggtgaatgagagggagcggccaacgtataaaacaaaatagtaagttcataaaaattacagtgcacaatagkctcagataaaatattaattgttaaacagaattccctgtatgtgacatgttctctttcctaataattttcagttatttcaaactttttactcaagttttttcaagcctccaattaaaggtgctgagctgcaccagtctctgtgacccccagctccaaccttcttcactacaattttgggggtactagcacatgccaggtacagtactcaattataaatatatgatttgtgtatatcgtgtgtgtgtaaaacacttcattttccccatggaaaaatttatccctcaccaccaccctataaagtagagtttgttacctccactttatagatgaaacaacaaggttccaagaagatgttgcataatattctacagatgaaataattargaaatcaggccgggtgaggtggctcacgcctgtaatcccagcactttgggaggccaaggtgggcggatcactaggtcaggagttcaagaccatcctggctaacacwgtgaaaccccrtctctactaaaaatacaaaaaattagccaggcgtgatggcaggcagctgtagtcccagctactcgggaggctgaggcaggagaatctcatgtacgtgggaggcagaggttgcggtgagctgagatcttgccactgcactccagcctgggcaacagagtgagactccatctaaaaaaaaaaaaaataggaaatcagatgatttgacccaatgtgtctgtctctaaaggctgaatataatattgctttccccacatatatcatagtgctgctgtcacaggttgagttagctggctctgattttaaatagctaccatttaaatagctaccatttgctgaacatattgttaccacccagccacagtgatattgtttggaaaaaaacatttacaagttcaaggccatgttcaagttgttctttttggcttcagatctaatataccacagcacatcccctcatccctgtgcacttggagggcaggagggtgtcttagtcagtgttgcttccttccaagtcccgagcacagtgctgtgatgtagtcaggactcaatcttgataaacattggtgtaattaacaggtttcaggtccaccaaagaagtatatgctatgctgatcattgcagaagaatcccaaacataatgcaccccattttccagacacaagtgattgggagaaataacgaacttatgttgcgactcatggggagaggttacaaattgatgccaaaatctagtctcacacctgcttttttgctccccccagtaagtgaaaatggtgatcacctaagcacatggatgagacgtgagcacagttatggcagagaagtttctccgcaccagaattatccacagcaacttggctgagccccactacayacagagaaatcatcaacctgacttaagagttttcaagatgtcaacttmaggctgatcagcagatgggatgtgaaaaatactaccctattctatcatttgctgttgcttgctgaactgtgaagaactgcatgaactatatttaagctgctttctgtaccattgccaatcacctttttggagttggaagtgctattttcctatggacttttgcattatttcattgtgcatgcatccagtgattatacataagcaacatatgtaatctgcttatatatttttaaaaatccatccacacacatggtaaattaagtataaattcttttgcaaaattatagttcatgtcattgaaagtttaaattggtttcatttaaagatcaatatactaggtctgccttcactttatagaaaactagcttctataaagattttttcactgtttactagtgaaatgagaaaagcaaagctatttataaaaggccttatgtcgtgtacatacattgtctttgaaatatttgtgatctagtttattgcttgtaaaagagaaattatataatttatttagtaaatactactgtaaactatagttttgtgagagaaataaaatattttgttctcaattgtggtggtacatcgattccagtgatttatggtctttccatttcttcttttattaaaaataacccaaatactcctcatttgagatattcagaaatcctaaataaactgaatttcatgatggataaaaatgggaaaaacttcaatagcagcttctgctgaactcatccaaagactttcccaaatgtcctggtatattagtcagctttcactatgttatgctatggtaacaaacaatcccaacatcataggagctttcaccaacatagttttacgtctccctcacatgtggggaccagctgcagctctgctccaagagtcttcttcattctggggtccagagcagcccctatgtgggacaggcaactttcatggcagagaaaaagagcaatggtggaaccaatgagagctcacaaagcttctgtctcagtgcagctgacagcatttctacttgcattccatccaccaacatgagtgacattgacaggtctggagtcaaaggtgtgggatgtacacttctcacatgggaatggactcagcaatgaatattttaattaattaatacagtttacaccacctggtaagtgtccctagcaacagagacgtaagaggttgagagaaaaatcattagaaagcaaaatgatcaaggctgcagaaagatattcctgatgagtaagatgctcagtgttaaatacttcgagttaaaacaagctgattcttgtaagcaagcatgctgtaaacttttgtaaatgtagcccagagccatagttactcagcataagtagcagtttcacctgcagagtcagtgctggaaagctaggatgtcttacatcctaggttaggatgtcaacagggaattctgcagaagtggatgattgaggatcctctgcctctctctagtattcatatgtgctaccactctcccttactacatgggttttcataggtgaatcccactcttcccccctcccatttgtaaatctacccatttaagcagggttcttagcctaggacccactgatttctagaagagtcatagataaatgttaatagggccatgaaatcatatacacaagttgggtatgcttttgtgtatatggggtgttttttttttcatgaagagaaagactatactttttatcaaattcacagtgacctggacccaagaaatgttaagaacctttattttaagacctaactcaaaagccgtttcaataccatgaggctgtgatcctcaaaactctatccccacttgaatcacccgtggcctgcctgtgttgtctcacctgtctcaaaaaacctcaacattttcaaccgttttttaatgactgaggtataacttacatatgctagagtgcacagctatgaattgtatagtccagtgaatttttacatatgtgtagacccatgtgcccagcacctaaagcgcatagaaaacatttgcagctaacctactggcttttttttttttttttttttgagacagagtctcgctctgtcgcccaggctggagtgcggtggtgcagtctcagctcactgcaacctctgcatcccgggtttaagcaattcccctgcctcagcctcccgagtagctgggattacaggcagctgccaccatgcctggctaattttttgtgtttttaatagagacagggtttcaccatgttggccaggctggtcttgaactcctgacctcgtaatccgcccgccttggcctcccaaagtgctgggattacaggcgtgagccaccgtgcctggccacctgctggctctttcatgtcccctctccaccaatgccatcctcaaaggtcactattatgacttccagcatcatagattagttttgccagttcttttttaacaaaactttattggtaatagttggttttttgttttgttgtattgagacagagtctcactctgtcacccaggctggagtgcagtgatgcgatctcggctcactgcaacctctgcctcccaggttcaagcgattctcctgcctcagtctcccaagtagctgggattacaggtgcatgccactacgcccagctatttttgtattttttagtagagacgaggttttgcaatgttagccaggctgttctcaaactcctgacatcaagtgatccacttgccttggcctcccaaagtgctgggattacagcacccggccttattggtaatagttttgacatatgtttacaacagcacactgttcaagaggaaatctcatcttttcacagcaagcaggttgaatcaccctgagcccacctggggacccaccccaggcctgagagctcctcctgggatggggagaagtgatgagagggggaaatatgaagatgaatgaggtggcttgccagcagctcctcacttttctattaagaaagaaaacagaccagggacggtggctcactcctataatcccagcactttgggaggccaaggcagctggatcacctgaggtcaggagttcaaggccagcctggccaatgtggcaaaacctcgtctctactaaaaatacaataattagccggggatggtagtgggcccctgtaatcccagctactcgggaggctgaggcaggagagtcgcttgaacccgggaggcggaggttgcagtgagctgagattgtaccactgcactccagcctgggtgacagagtgagacttcatgtcaaaaaaaaaaaaaaattgaaaacagcacggggtggcaggggagaagaggtgaaggatggctgacagctaagctggagaggggcacccaggatgggagaaggcagaagctgctgggtgaataaaacaggcagcccctccccagcaaccctagccttgaaccctgggcgatgaggtgggggtggaggggctgggcctcttccatgtccttttgcaggactgccttcccataaggagaggctgggcatcacaatctggctgagaataaaattaaggagtttcggggaaatgctgctgtgaagaaagacttgggcttggaactcccactctgtctttttgggggacaactcctctttggcagggagtagggcagctgcttttctggctcccaaagcccaagggtgaagaaaagtctgctggggaagaagagagtggagcttcctaaaagaactgagacctttgcaagagtgatagaggatgcccctggggaggggggagggggaaatcagcagttcacgggggaagttcaaaccccagagcctccttccaaagtcagtcggcttcctggatttgttaaaatggaatggggagacacggtaaggtgggaagggtgggaggggtggaagtagaggaaggaggaaaggggacactggtggaacttaaataagattttaattgttttttgttttaattttttattctagcaaacagcccactgaacatggcactaaacctctctccttcccaggcaggattacgccaaagggtaggtgtgcttttcattcatcctctcttagtaagtggtgcctgttcagggctggagttaagtttgagcccctctttccacaccgtgtcccttgatacaacagcaagacctggcctgaatagagctgagaaactcgtttaaaacaggcagaagggggctggggcaagggggaccctgtgggaggagaaagagagaagcacagagggaccaggaaggcatgggssggggtgagggagcagctggtgtttctgttcctccaaatatctgggcttcctgctcccccaaccctggagggtggggtgaggatgaaattagatacaaggaactctggggccctctggctgttcaatccaaccctcccatcccccaaaccaccaaaaacaaaaaggaaagaaaacccacaggggcacaagcacacccctaaaactcagaaaactccttggcacacttctcattgatggagatccggagctcttcctcctcgtagtcgtcaaagttactggcatccccagggcctgtgtacttcgggatgaagggagcttccaccttcttctcatagatggcgatccagctggttgtggcgaaccacttgtggttcttgatgtcgccaaccccgttcctgaggtttccgaagcgcttggtgaggtccacctgcagcaggctccgcagcagatgcttgaggtcagagctgagtttggagggaaaccgcaccctcccagagacgatcttctcgtagatctggatgggctggtcggcgtagaagggtgggaagcccacggccatctcatagatgagcacccctagggcccaccagtccacggccttgttgtagcctttgctcaggatgatctcgggggccaggtactctggggtcccgcacaaggtccaagtgcggcccttcacgcgcttggcgaaaccgaagtccgtcacctgcaggtagccctgctggtcgatgaggagattctcgggcttcaggtcgcggtggatgaggtcgagcgagtgtaggtactggacggccaggacgacctgggcggcatagaaacaggcatggggctcgctaaaccttccgacgcgctgtaggcgggagaacatctccccacccggcacgtactccatcaccaggtacaggtaggagttgtccttaaaggagaactggagcttgacgaggaacggaaagtcgatcgcctgcaggatgcgcttctcgttcagtatgtgctcgacctgcttcatcttcaccaccttctgcttgttgaggatcttcatggcgtagtggccgccggtctcctggtgcctcaccagcatcacccgcccgaaggagcccatgcccagcgtcctgagccgttcgaactgatccgagctggcggtgttttgagcggggtttccccatctgtagaggaaatctcctctggctttggctaggaannnnnnnnnnnnnnnnnnnnnnnnnnnnnnnnnnnnnnnnnnnnnnnnnnnnnnnnnnnnnnnnnnnnnnnnnnnnnnnnnnnnnnnnnnnnnnnnnnnnnnnnnnnnnnnnnnnnnnnnnnnnnnnnnnnnnnnnnnnnnnnnnnnnnnnnnnnnnnnnnnnnnnnnnnnnnnnnnnnnnnnnnnnnnnnnnnnnnnnnnncggcggcggcggcggcggcggcagcggcggagatggcgccccctggggctggctgcgctggctgcggcgctgcgacctccgcccggcctccgcttatattcccagctacatgggaggctgagatgggaggatttcttgagcctgggaggtcaaggcttcagtgagccaagatcacgccgctgcactcaacaatatggataaatccaaaaggcattatgcaagtgagagaagccaactctaaaggggacttactgtatgaatccatttctatgacattccagaaaaggcaaaactatagtgtgagagaacagatcagtgattgccagggcttggggttaggggacggttggactatgaagggacagcctgagggaatgtgggaagtggtgggacatgtttgtatcctgattgtgctggtggttacaatgtattgggtggtggtctacatttgttttaaaactcatagaactggccgggcgcagtggctaaagcctgtaatcccaacactttgggaggccgaggcgggcggatcacaaggtcaggagttcgaaaccagcctgaccaccatagtgaaaccccgtctctactaaaaatacaaaaaaattagccaggcgtggtggcgcatgcctgtaatcccagctactcgggaggctgaggcaggagaattgcttgaacctgggaggcagaggttgcagtgagcagagatcgtgccactgcacaccagcctgggcaataagagtgaaactccatctcaaaaacaaacaaacaaacaaacaaacacctcaaagaactgtatacttccccccaaaattcagttttactgcatgtaatgttttattttaacacatacatatgatttcctttcttctgtttgctttgggtttaattgctcttatttcctaaggtgggaactaaggtcactgatttgaaatctttct

SEQ ID NO: 95454 - DNA, 26067 bp, Homo sapiens
  misc_feature (1)...(26067): n = A,T,C or G
gcctggctaattttttatatttttagtagagatggggtttcaccgtgttagccaggatggtctcgatctcctgacctcatgatccgcccgcctcggcctcccaaagtgctgggattacaggcatgagccaccacgcctggctgcttacagctcttgtatgtttcaccacactcatgtatttatcgagcaaatagagatgaatttggatcagagctgagcacagcaaggaacatgaagagcccaggaaacagctcccccccaatctattgagacaggaggatggtggaattgctggaatacacttctaacaagtctgttcctcctcctgggttctctccgcttagaaaaccaccaagcccaggagcccaggcatctgcctctgaaaggctgtgttgagcctgctgcaacagagctaatttgccaagcatggttggctgcgtcctcacctacacttcctcctcggggcctgctccccatcccagcacggatgcattaccaggtgttcagatcgtggtacagcactttgcagatacagggtagagatggaaatggaccttaagacttcactagtttacaggttcccaagtccagatttctttaaagaaagaaaaggtgaaagtccaggcacggtggctcatacctgtaatcccagcactttgggaggccgaggcaggtggatgacctgaggtcgggagtttgagaccagcctaaccaacatggagaaaccccatctctactaaaaatacaaaattagctgggcttggtggcacaggcctgtaatcccagctactcaggaggctgaggcagaagaatcgcttgaacctgggaggtggaggttgcagtgagccgagattgcacctttgcactccagcctgggcagcaagagcaaaactccgtctcaaaaaaaaaaaaaaaaaaaaagtccagccatggtggctcacacctgtaatcctagcactttgggaggccgaggagggcgaatcacctgaggtcaggagttcaagaccagcctgaccaacatggagaaaccatatctctactaaaaaaaaaaaaaaatacaaaacacttagcagggcgtggtggcgcatgcctgtaatcccagctactcaggaagctgaggcaggagaagcacttgaactcaggaggcgaagttagcggtgagtcgagatcatgccattgcactccagcctgggcaacaagagcgaaactctgtctcaaaaacaaaaaaaagaaagaaagaaaaggcggccaggcacgatggctcatgcctgtaatcccagcactttgggaggccgaggcagccagatcacgaggtcaagagatggagaccatcctggccaacatggtggccccatctctactaaaaatacaaaaatcagctgggtgtggagaggtgcgcctatagtcccagctactcaggaagctgagtcaggagaatcgcttgaacccgggaagcagaggttgcagtgagctgagatcgcgccactgcactccagcctgggcaacagagcaagactcagtctcaaaaaaaaaagaggcttcattgcttttttttttttttgagacagggtctcactgttacccaggctggcatgcaatgatgtaatctcagctcactgcaacctctgcctcccaggttgaagcaattctcatgcctcaggttcccgagtagctggaattacaggtgtccagctaatttttgtatttttttgtagagatagggttttgccatgttggccaggctggtcttgaactcctggcctcaagtgatatacctgcctcggcctcccaaagtattgctttttaggaatagtgaccgcattccacattcagcagcggatggggaacgttcctctgttcacttcacctccctatgccaaccacagcccgcagccttacgggcctgggtatggatggctgagcaagaaaggccaggcatggtcgactgagccgtggacctcccccggacctctcctgcctccagtagtccctgcagcaaggggtcctgggcacctgcccctgagcagggaggtttataaagtgcctggtgtttgggaaatgcccctcgaggcccaggtggtgcagcacagcccccccaacccccagcattctgaatcactgccacatgcttaaggacacccaatgcggccacggagaggtcacactagtaccttcaattcctatctgtgagtaggtcctcaaggcttcctctgctcccagtcggacaacccatcggctgggacagtactgattctccagctcctgcagggcacaaacatgaggctccgtaagactttccttctcaacagagtgtgcccctccccctcgcccatgcccggctgctcctctctgccttagaagccctcgccccagtatcccagggtctccaagatgccctcagatccatggtctagaggtataccagcgaccgctgtgcctttagccagctggcagccttaaggggagatgaggtcccccaaacgaattcagttaatgccatcatgggcaccactcccacagcagttacgaccaggggaggccaggtggcccggtggctcacgcctgtaatcctagcactttgggagcctgaggcaggtggatcacttgaagtcagaagtttgagaccagcctggccaacatggcaaaaccccatctctactgaaaacaaaaactagccgagcgtggtggtgtgcacctgtaatcccagctacttgggaggctgaggcaggagaattgcttaagcctgggaggtggaggttgcagtgagccgagatcgcaccactgcactccagcctagcgacagagcaagactctacctcaaaaaaattaaaaaaggaggagctgatctgcgctgagagggtgcgattctgaccacaggaggtcactgcacagtcaaaggcacagaggtgaggaggaaggaatgaaaggtcagtttgcaaatgctggcaggccctatggctgacacacagaggtgaggctgggaggctgggctggaggaggaggggcggtgaatgtcgggctaacaccttcacactttatgcagaaagtaacaaggaaccattctgaggcagtttggagaattaaaaaaagaaaaaaaaaaacagaggctgggcgcggtggctcacgcctgtaatcccagcactttgggaggcggaggcgggatcacgaggtcaggagttcaagatcagcctgaccaacatgatgaaaccccatttctactaaaaatacaaaaattaaccaggcatggtgacgcgcgcctgtaatcccagctactcaggaggctgaagcaggagaatagcttgaaccagggaggcagaggttgcagtgagccgggatcatgctactgcactccagcctgggcgacagagtgagaccccatctcaaaaaaaaaaaaaaaaaaaccaacagaaaatgctggacacggtggctctcgcctgtaatcccagcactttgggaggccaagataggcagatcacttgagtccaggagttccagaccagtctgggcaatatggcgaaacactatctctacgaaaaatatgaaaaatcaaccgggcatggtggtggacacctgtagtcctagctattcgggaggctaaggcaggagaatcgcttgagcccaggaagcagagattgtagtgagccaagattgcgccattgcactccagcctgagagagcaaaaccctgtttcaaaaaaaaaaaaacaaaacactgggcgtggtggctcacacctgtaatcccagcactttgggaggctgaggcgggtgaatcacctgaggtcaggagttcgagaccatcctggccaacatggtgaaactccgtctctactaaaaatacaaaaattagctgggcatggtggcgggcgcccgtaatctcagctactcgggaggctgaggcaggagaatcgctggaactcgggaggtggaggttgcagcgagctgagatcccaccattgcactctagcctgggtgacaacagcgagactccatctcaaaaaaaaaaaaaaaaaaaagtaacaaggaaccagattttgaagaaagggctcaaaaccatcatgagaaatgggaagtcagggcagcctcatggcaaggcctgaggtcaaatgccatctgacctccctcacttacttactgttttatcctcaacaagttacttagtctctgagattcagtttcctgactggtagaaggtatctatccaggcccggcacagtggctcacacctgtaatctcagcactttgggaggccgaggcgggtggatcacttgaggccaggagttcaagaccagtctgtccaacatggcgaaaccccatctctattaaaaatacaaaaattggccaggcgcagtggctcatgcctgtaaacccagcactttgggaggccaaggggggcggatcatgaggtcaggagttggagaccatcctggctaacacagtgaaaccccatctctactaaaaatacaaaaaaattagccgggcatggttgcgggcgcatgtagtcccagctactcaggaggctgaggccggagaatggcgtgaaccctggaagaagaggttgcagtgagcccagatcgcgccactgcactccagcctgggcgatagagcgagactctgtctcaaaagaaaaaaaaaaaaaattagccaggcatgtagtaccagctacagtgtgcctgtaatcccagccactcgggaggctgaggcaggagaatcacttgaacccgggaggtagaggttgcagtgagccgagatcatgccactgcactccagcctgggtgactgagcgagactgtgtctcaaaaaaagaaggcatgtatccaaatcacaaggttaaaagagataaagcatgcgagtaaaataaagcaagccagtcagtgtgggttgcttcttcctcccagtgaaggagctctttgtcagaggtccttggatctgtccaatctgtacctggaaaggttattacctgtaggatccttacagccacacctggcacactctgtgatcactaccaccatctttgttgctattatttatgatcatgattatacaatgggtttcttttctttctttctttttttttttgagccaccgcacccggcctgtatgtttctaaccttcacaaccccaatgtaaataccagctgttctgaatccttcagcctgtgccacataagcacagacccaaaaacattgtgtaacctcagatcaaggtccagaactttgtcccctaacctcctgcgggtctatggatttttttttttttttttttttttttttttgagactaagtcttggtctatcgcccagccttccaggctggagtacaaatggcatgatctcggctcactgcaacctccacctcctgggttcaagcgattctcctgtctcagcctccccagtagctgggattacagaggtacatcaccacgcccggctaatttttgtatttttagtagaaacggggtttcaccatgttggccaggctggtctcgaactcctgacctcgtgatccgccaaaagtgctaggattacaggtgtgagccgccacgcctggcagggtctacggatattattagcatagtcaggacttcaattttctttatcctgaaaaccaggttaacaaaaatccttaggagaaggtaaaatacaccatggtgctcaagcactggggacctggcacgcactaggcgctctgcatgcccacaggagtgctctagacggcttctaagcttccttcttggaattccaatctaataaatgagctaactccgccccagccccttagtccctccctgcaatccacctacctctgcagacatcttcttccaaggaaccttgcttgggaaacccacaccagacacatccatcatggcgtctacagccgcatgggcgtgcgtccctctgtttatatggccagagccccgcctcgctccgcccctttaaacttggtgggcggaccgaggcggggctcagaccaggccccaccccgatcagccacgtccatcgccctgatttccaggccctcccagtccytgggcgcacgtcccggattcctcccacgagggggcgggctgcggccaaatctcccgccaggtcagcggccgggcgctgattggccccatggcggcggggccggctcgtgattggccagcacgccgtggtttaaagcggtcggcgcgggaaccaggggcttactgcgggacggccttggagagtactcgggttcgtgaacttcccggaggcgcaatgagctgcattaacctgcccactgtgctgccyggctcccccagcaagacccgggggcagatccaggtgcgggggccagccctgcgcgtggctggggatgaggtggtcgtggtgatagcctgtgtccaggcatccgcgcagggcgggccctcaaatgacctcaccttctctcctaggtgattctcgggccgatgttctcaggaaaaaggtaatggcttcgcggggctggggtggagctccttcctcttctccggggaccccttgtccctcccctcccctcccctcccctcccctcccctcccctccccttccctccccttcccttccctccccttcccttcccctagaaggaccagcacagcctcctacagctcccgcctggggtgctcctcccttgaattcagtccaggaggaagtctctgccctcttctgcccaggccaagcccctcgtcctgtgtggacgccactccctcctggagctggtgacagctgcttacagcttagctgtcttccccaccaagtcctctgagaaggtggcaaccagttgtgtcccctgtaggccaggcctttttgtacacccctattcaatgtggctgtttccttctaaggccaaggaaacgtagtcgctttctaaaccaaggagtctgaagccgtggagcctctgctctcctgaggtgatagaaccattccctgacccgggtggggctagtgagtttcttgagtaaactacccacgcaccattctttttgttttgtttttgttcttctagaggtaggatcttgctatgttgcccaggctggtctcaaactcctgggctcaagcaattctctcacctcagcctcccaagtagctgggactacaggcgtgcacccccccgcctccacccagctaattttattttatttttatagagctggggtcttgctatgttgcccaagctggtcttgaactcctggtctcaagcaatcctcctacttcagcatcccaaagtgctgggattacagatgttagccaccatgccctgccccaacattcttttatggccctggggatcacttcagctcaaaccccttgctcaggaagatgtggctcagagttggacttcttggacccagaagcaagtgcttttgacgctgcacacaaagactttctgaaattaatttagaaaagctgtatgccaggtgtggtggcccacgcctttaatcccagcgctttggaaggctgaggtgcgttgatcacttgaggttaggagtttgagaccaccctggtcaacgtggtraaaccccatctctactgaaaaaaaaaaccaaaaattatctgggcatggtggcagcctcctgtaatcccagctactcgggaggttgaggcaggagaatctcttgaaccyggaaggcaggggttgcagtgagctgagatcgctccactgcactctaacctaggcaacagagcgagactccaccccaaaaagaaagaaagaaaaactctgaactctgggaacaactctgggatgaggttactttggaatgcagtcgcaggttccctctacatgtagcctttgcttctgccttccccactacatcttggagaaggttactcctcccacacttcctgggaccacctgagtaccattcctggacctcttccccatagagaattctgacttccaaccctctttgtagggatattataccctgcctgctctgccctgctcttttctggctgtggtgggctcagtctgcataccactagggacaatgaggagccaggcttgttggggaggggtctccttctcccactcctcccgccgtggacctcacctgaccctctctcctcttgcagcacagagttgatgagacgcgtccgtcgcttccagattgctcagtacaagtgcctggtgatcaagtatgccaaagacactcgctacagcagcagcttctgcacacatgaccggtcagtccctgccccctgcagtcctgtccagtggaaaatcacaaggcacaggacacactgttaggactctctttaatggggatggttaatcatttgaacattgaatgattcaaatcagcacactttccaaggtgcttggcaaggtagcgcacactctccactccctgggctggagccagtggttctccactgagggtgattttgccgccagggtccatttgacaatgtttgaagacatttctagttgttgcaactggaggggggaggggatgcttttgggctttaatgtgtagaaatcagggacactgctgctaagggtcctatggtgcagaggacggcccccatgcaagaacgagctggccccaaatgtcaggagcctgccagtgttcagaaactctgccgtagggtttcagcttcacacaggctgcagactggtttggtttggcctgcacgttgatttttgtttaattttttagttgtccgttgttggctggctcccccgtcacctggcagccttcacgcttccctgttttatgtgtagctgtttgagctcgctggacatttccgcctgcaacctcagtttgggagttaaattcacttccttggcagcagatgtgggccygatgtttctgagcctgagacgctttgcttggtcctctggacttgtccacctgggcacccagtggcaaagccatgctgtgccacacattatagggcttcagcctcagagccctggctgggagctgtatccgagagttgctatggctgtgcagagaacagatccacccggcgtgtggccttcggtgggagctgaggggctcctgaagccagatgctggtggagtggagggtgcttggggcttggagttgcatgtgggaatttaaccgcacttcgtgaccatgctgtctgatgtaggtcatttacttttccaaatttgcttcctcattcctaagatgcgatgtccacggcacagggtggtgttacacctggtggggacagggaaagcagaggaggtcacttcgttccagctgttggaagtacaacttctggagtcagtcagatccgggattaaatatgagttctgcccgtgtgtcacaagtcatctctaacacgggccacagaggccaaggctgggccagcagcattgatggctcgagaggctgcccttgcaggggccacagctggcctcccacctgccctcactttgtctttctctgtttagggagggaagagggaatttaaaatgcccaaaatactgtttcacacattctttccagaactcgaagtaggattatagcaaggtaataacgaaacaatagttgtaaagtatgtttttttgtttgtttgttgtttgtttttgggacagggtctctctctgtcacccaggctggagtgcagtggctcaatcatagcttactgttacgtgaccccaaacccttgggctcaagtgatcgtcccacctcagccccctgagcaggtgggactacaggcgcacaccaccacacccagttaatttttacatttttttcacacagtgtctckctgtgttacccaggctggtctcgaactcctgagttcaagtgatcctcccgtcttggcctccccraagattacgggcatgagctgctgtgtctggccagaatacaggattttaaaaatttatgttttgcaacataattaatataaagacaaatataacccaggcccagttctagttattcattcttctgaattttaaaaggaaacatttggctggcccctaatggtatcatgggccctggtacctgatgaagttggcctagtctgcccccagctcctgaacagtggaagagtttttagtctcattgagctttgtactggacattactaatttctaatccaaagcatcaagtgaagtggcttgtataaataactggttttcctctgggaggctaaggcgggtggatcacttaaaagttaggagtctgagaccagcctggccaacatggtgaaaccccatgtctgctaaaaatacaaaaattagctgggtgtgatggtgtgtgccagtagtcccagctactcttgtggctgaggtgggagaatcgcttgagacccttgagaattgggaggtagagattgcagggagccgagatggcgccactgcactccagcctgggtgacagagcaagactctgtttcataaaaaataaataaataactggttttctggacgagggcctttcccataggtgctaacttctcaaagcccggctgggtgaacactgagcctgctttgcaggtagcaggtggtcacgacagtgccattccctggcccctgcattgtggcttctggcctccctggccctgctcacgctctggctttctcttcccaggaacaccatggargcrctgcccgcctgcctgctccgagacgtggcccaggaggccctgggcgtggctgtcataggcatcgacgaggggcagtttgtaagttggcttgtcttggcatcactcttcctgccagcttccgctctgtcctcccgttttccctcgctgacttggaagttatctgatcttttagtaaaataacaaggttaaatagctacaactagtgttggaataccctctgaaggcccctttctagtttccctgtcatagtgtcatagtcttgtaggattcgttttacttttttttttttttttttgagacggagttttgctcttgttgcccaggccggagtamgatggcacaatctcaccgcaaactttgcttcctgggttcaagcaattctctcctgtctcagcctcccgagtagctgggattacaggcatgcgccaccacgcccagctaattttatatttttagtagagatggggtttctccatgttggtcaagctggtctcaaactcccaacctcaggtgatccgccccgccttgaactcccaaagcgctgggattacaggcatgagctaccacacctggccattgtacctttttaaaaatacatatatctatttactggcaagatgcagtgactcacacctgtaatctcagcctgtgggaggccaaggtggacagatcacttgagcccaggagttggagactcacctgggcaacatagtaaaaccccatctctaccaaaaaaaaaaaraaattagccagtcatagcagcgcacacctgtggtccctgctactcaggaggctgaggcagaaggatggagcctgggaggtcgaggctgcagtgagtggtgatagcaccactgcactccagcccgggcgacaaggccagaccctgtctcaaaaaaaaaagggggaggtggggagtaatgtttggtttgcctcatggttccttttgcttgtttcttatacgtttattttcttgttgttgaagtaccttttttagtagtttttgcagccaggaggtatagatgggaagctgccagtctttgtatggaaatctttcttttgtcatctagtttaagctgggcagcaagaggtaggttgatcttgtgtgggtttgggttttttttttttttttgagacggagtcttactctgtcgcccaggctggagtgcaatggygtgatctcrgctcactgcaacctctgccacccggattcaagcgattttcccacctcgcctcccaagtaggtgggattacaggcacccaccatcatgcctggctaatttttgtagagacaagggttcaccatgttggctaggctggtcttgaactcctgacctcaggtgatccacccgccttggcttcccaaagtgttggaattacaggcatgagccgccgtgcccggcctttttwatttttattttttttgagatggagtcttgctctgttgccctggctggagtggagtgacgtgatcttagctcacagcaacctccgccttttgggttcaagcagttctgcctcatccttccgggtagctgggatcacaggtgcgtgccaccatgcgtagctcatttatgtatttttaatagagatggggtttcaccatgttggccagctggtctggaactcctgacctcaggtgatccgcatgcctcagctcccaaagtgctgggattacaggcgtgagccaccacgcctggtcttgatcttgttgctttgaaaagtagcagcgctggtcattgtgtttttgctcagaggaaggccgccatctctctaatgttacctctggtcaggtattctatctgttctctctcagcacaatgtgtgtaggggaagctttgtttcatttatcctgctttatagctggtgtgccttttcatttctggggaaggaatgaagccattatcacttcaggtatttctctcctcatccatctctgaggtgttctgggttccatcttccagagtgtgttttgtttcagtgactatttttacatctgctgctctaattcatcatgctccgttttgtttgacaagttactgttgggttatttttaaatttatgctgttccttccattatgttcctgaaaatcttttcttagacttttccagatttttctatttcctcaggaacatattctgtggttgagtttctgggttattttctgttatcttagttttctttcctctgctttggagattttatttttgttagtttatcacaaagaatgaaactgaaactctctccaaggggtttagcagacttgacctcttaggtacttttagggttgcctcgaagtacacaatgtggtggtttgatataaacataacaggaatttatttctcgctcacagaccccctacgtggttccaggccggttgatggggaggccgcccacgaggcggcttaggtcgccctggctggctgtatacagacacggaggggaagagacgtggcggagcccctgggtgtgaggttttcatgggcctgaccagaagctgcaaacgtcacttctgctgatctttcaaagactagaacctgggcacagggccacctatacgtttagtatacttagtccagttcgttttttgtttgtttttaaaaacagtcttgctctgtggcccaggctggagtgcagtggcgcagtctcggctcactataacctccatctcccaggttcaagtgattctcccgcctcagcctcctgagtagctgggattacaggcttctgccaccatgcccagctaaccttttgtatttttagtagagacggggtttcatcatgttgaccgggctggtctggaactcctaacctcaggtgatctgcctgcctcagcctcccaaagtgctgggattacaggcgtgagccaccacgcctggccacacttagtctagttctataccctggaggaagaataaatgagttkgtttggtgagtgcttcraggtctctacccgccctgcctcccagcacagagccaggccgctctggcctgaataccctgcccggacgtcacagggcctgtcccctcaaaaggccagtcctgccttcctggttctgttcttgcccaacattctgtatgagtcacagctgcaaattccattcccgtggggaggctgacgggtcccttcccctgtgcggggcatctgccctgtggagttgaggctgccagtgtccgctctgggttcccgaccacccggcagctggcatctcctccccgcttgggtatggccattccgtttctgaccttcagaggtgcgcccctgagcacccccatgcctctgcgtacgtggagacgtcgttgttgctgccccgtgcttgagggactcctggcgagaaagtgagcccaggctgggaatagggctgcagctgttctcttttgctcccaaactgtggcctcagaatgcatccagggattttgcatcagctttggggacatggccctctcagaacaaggaagcttcagctttggcaaggctctccctccttcagacctgccgctgtgagttgttcaatagctctgttctcctggctctgcgtaaaccttgttgacagaggctgacccagacccccgaggcagaaacctttcccttctccttcctcgacatccaaatgccctgagtcaggagccagcgtatgaagtcctgtcccctgttcagcctrtaggagggatttctcggtctacttcctccctggccagcaagtaaaacttgagttcattcagtgagtatttattacaccctacccagacatcagcattctgccctggcctctgtgtgcccttgttctcttcaagaagttccgggtcaccagcctgaccaacatggagaaactccgtctctactaaaaatacaaaaattagccrggcgtggtggcgcatgcctgtaatcccagctacttgggaggctgaggcaggagaatcgcttgaacccggtaggcgaaggttgcagtgagccaagatcgccccattgcactccaagcctgggcaacaacaagagcaaaactcagtctcaaaacaaaacaaaacaaaagaagttcagggtcttcccattgcaagcagttctagatcgaggagaggggttcctagcatgggacccagcagaaggactgtccttcgctccttcattgtctacgtggacagtggatgaagcycagccgaacctgccttgttcccgttttctgggtcagcagggaaagcctttcacagagtagccaccgtgccatcctgaggaaggccctgggtcagaagcttctgtgcttctttgtaccccrggcragacacacaggtgctcacactgctctgtagaaactgttggcatccaagagagactcacctggaaatctctggaaaacctgaagctcctagctgggggtgctgtgcttcagatgctggtggtgggtgggcacccttgcatcaacagctgcacagtgtgtggtgggcttgcagggtcgcttggcaatagtaggagctctgatttatttttttaaactttttttctggctgggcacggtggctcacacctgtaatcccagcactttggaaggcctaggcgggcggatcacttgaggtcaggagtttgagaccagccaggccaacatggtgaaaccccatctctactaaaaatacaaaaattagccaagcgtggtggcacacacctgtaattccagctacttgggaggcagaggcacaagaattgcttgaacctgggaggcagaggttgcagtgagccaagattatgccactgcactccagcctggatgacagagcgagactctgtctcaaaaaaaatagacaaagccaggcgcagtggctcatgcctgtaatcccaacactttgggaggccgaggtgggtgaatcacgaggtcaggagatcgagaccatcctggctaacacggtgaaaccccgtctctactgaaaatacaaaaaaattagccaggcgtggtggcgggcacctgtagtctcagctactcgggaggctgaggcaggagagtggcgtgaacccaggaggcggagcttgcagtgagctgagatcacgccactgcactccagcctgggcgacagagcgagactccgtctcaaaaaaaaaaaaaaaatagacctttttgtgttttctgttctactacacaagtaatacaggttgagtattccttaacctaaatgcctgggaccagaagtgtttcggatttcaggttttcgaatatttgcatgttcataatataatgagaccttgggaatgagccccaagtgtaaacacaaaatccatttatgttttatagacatcttaggcacatagcctgagagtaattttatgtatttagtaatttggrcgtgagccacagtttttgactgtgacctgtcccatgaggtcaggtgtggaattttccacttgtggtgggcgctcaaaaagtttcagattttggagcctttcaggttagagacatgcaatctataataagtttaatctaggaaaagttagggtctggcacagaggctcacgtctgtgatcccagcactttgggaggctgaggcaggcagatcactggaagtgctggacgggtggggaagtgccgggtgcaagaaccaagctctttgactatggacctcagcctgaggttggtcaagaggtggagtgagtgggggctgaggaccttcatcctgaaaccctgatgcaggagagtctggggtctgccttctaccctcatgtggcgggtgaaggagcaaggttctyaactcaggagggttcttcccctctccattcccacccaggggacatctcacaacaactagaaacaattttgtcgcagctggggggtgggaggtgtgttcctggcatctatctaatgggtgggggcgagggacgcagcccaacaccctacastgcacaggacacagcgagatccggcctcaaatggcagccatggcagcgtcagccctccagggggcgcgcccctggcgcaggtggtgtgccggcccacagctccttgcaggctgggagctgcattttcgtgacatgtcatgagtcctcagagaaaaagagggaacgagtgcatggtggggaggggccctggcgtgctggagtctctgggtttccttctccagagacccctgcagtcagctgagcgcaatcagtcacgttgggctttgcttggatctcactggaatttttcgagccaccccttagtcctcaccttgctaagccctcacgtctcaataacctcaaacctcagtacctgggctgagaaagcctgagtggccctgggagagagaccctgcacccaaggacaaggacatccctgcttcacccaacccaaaggccagtctggacatatgaactcaaccagctaagagtgatatgattgattgatgagaatcaccagagcacttgccagagtttcagcttctccctgggccaaagtgaagtttgctttacacagtaaatgtgctctgtgcaggtcctgaatttagaaggctgtgctgtgtcatcctgctctgtaaatggccagtaggacccccgccccttctcaaggcacattacccgtttaaaacgggggaggcaagagcacaaagcgcccacctattcaccgaagagcatgtatataacttagggccttccatccttaaacaacaggaccttccttgctcttamggaaaaggaaacaggttcagagacgttaattcattgccaaggtcacacagataatgggtccagcgaagagtggtgtccgagcccaaggcagcaggcctttggccactgcagtgttaaacagcacagctggtgtggaagtccggtgctgagtcctgggtacctggactcggagggaagctggctgcagggggaaggggctgcgcagttgtggatgtacctgtcgtctgctggggggcgtgcgggtggacacagtcccccggcctggggagcctcgtgggagaattaagagttactccgggccaaatggccggagttgtcagatctggcagcgtcttcgctggggctccagggagctgctgctggggtggaagctctcacactctttctccacgtgccctttccagttccctgacatcrtggagttctgcgaggccatggccaacgccgggaagaccgtaattgtggctgcactggatgggaccttccagaggaaggtaaggcgtctgatccaggtctggagctgggattgaggagggcaagaggcttctggatgggcacagagacaccagctctgggtgaccagggctcagccaccacagggttacggccgagctgctcaggccttggctgagccaagggactccatggtctgtgcagactgcgtgccatctgttgyggcaggkgctttgaattggcaaagggacagagccgggcatggtgctctgggggttggggkaaggactaaggtcagagcaaactctcctggcttcagtrcttgtgaatcagagggtttaaaagaaaaacccacctggtaaggtggctgagcrccctctgtctttccatgggagcrcagccatttggggccatcctgaacctggtgccgctggccgagagcgtggtgaagctgacggcggtgtgcatggagtgcttccgggaagccgcctataccaagaggctcggcacagagaaggaggtagctccacctgccttccctgcaggccggcggggtgggggtatggctctgcctccttcctgtcctggcccttcacccatcccctgtccctgcggccaggtcgaggtgattgggggagcagacaagtaccactcygtgtgtcggctctgctacttcaagaaggcctcaggccagcctgcygggccggacaacaaagagaactgcccagtgccaggaaagccaggggaagccgtggctgccaggaagctctttgccccacagcagattctgcaatgcagccctgccaactgagggacctgcragggccgcccgctcccttcctgccactgccgcctactggacgctgccctgcatgctgcccagccactccaggaggaagtcggraggcgtggaggrtgaccacaccttggccttctgggaactctcctttgtgtggctgccccacctgccgcatgctccctcctctcctacccactggtctgcttaaagcttccctctcagctgctgggacgatcgcccaggctggagctggccccgcttggtggcctgggatctggcacactccctctccttggggtgagggacagagccccacgctgttgacatcagcctgcttcttcccctctgcggctttcactgctgagtttctgttctccctgggaagcctgtgccagcacctttgagccttggcccacactgaggcttaggcctctctgcctgggatgggctcccaccctcccctgaggatggcctggattcacgccctcttgtttccttttgggctcaaagcccttcctacctctggtgatggtttccacaggaacaacagcatctttcaccaagatgggtggcaccaaccttgctgggacttggatcccaggggcttatctcttcaagtgtggagagggcagggtccacgcctctgctgtagcttatgaaattaactaattgaaaattcactggttggtggacgcacatttctctttcacctgggtttccctgggtctcatggacagctccaacttgatttgggtggggattttcttccagatctttttttcttttgttttgagacagggtctctgtcgcccaggctggagtgcagtgacgcaatccctgctcactgcagcctctgcttccccagttgaagtgattctcccccgtcagcctcccaagtagccgatattacaggcgtgtaccaccacacctggctaatttttgtatttttagtagagacgagttttcaccatgttggccaggctggtctygaactcctggcctcaagtgatccacctgcctcggcctcccaaagtgctgggattacaggcgtgaggcactgcacctggcccccagatctttctgtagtaatactgatctcttaaccacaacccttgaactgagaaatgatcatggggtgtgtcctaagcagaacatcatctgccttcctgtctgggccagtgtcaggacaaaaatgggtgtacagaggagcccggggcccagttggaaggaagaggcactgtcctgcccgctgggcctgtgaggtcaggttttgtttgtgaaacaaactcttggtaattcaggagtcaagacatctctcagctgtgcctcagagatgggctgttggcagctcacttgsgggcaagcatcgctggggtaaggtgtgtcctgtgcaggcagggtcaccactcccagggcctccccagcctccctctccccttcgctagtgatgtgtcccaagccaaagccatcgggtgaggctgggagcagtgccctgttagttcgtactggggatttttaaacaatcgggacttgccgatgacagctccctctgtcattgctcaaaagaagaagccagaagttgctttagggccttgacctcttccagagatgggccttatctccgaggggtgggctggacggccaaggccgtgtcccaggaaggctccagaggtgctgaccctggaggaaggtagaaacctggtcttacctatggtacccctattcagtgcaagaaaggggcattcaccgacaactcccaggtacccccacccccactctaggaagggagcagcaggaccctggcactgcaggccagaaaaatcatcttgtttacaagctgagcacagttactattttaagatgttgatgaaaggcttgtgcggaatgcgaccccagacagagggaagggggccagccaggcaggctggagggggcggattgccactgccttgttcaaactacaagttccataaagccagcccctaagggtgtacccagagtggagtcttcctccaacccctaggctgtggctcaaccaatgactggagactgaatgagaaaacatttattccgtctccaaacagcatcccaggccgggcatctcccccacgattttataatacactcggcacagacagagtctgggagccatggggcacccctgccctccccaggcttcctaagtaacaactgcagaatatttacataaagctgggtgttgtcaggcaaagcccttccctgctgccaggggtgggagcaaggaggaagtgccatgagcaccagccccgccctcacaccacgggaggcagcccagaggccaccggcacagggtggtggcccccagatcatacagcagtgggcacaggggaagcaaacctgagtgaggacacaagagcctggtcyggctccgctgcacagggcaggtgtgatggcccccacgagtctttggcagagaacgcagataatagcggctcccacggcctgacccgggccggggggaagctgaggcacttgtcagtagcacatgggcacctgctggcttctagccactgcaggcggggctgaggtcattaaaagcgaggaaaaacactagctaaaaaccctttcctaaaagtgccctggaggagtgagcggctgactgaagccctctgggcacaggcacttggggtgtggctctgccagcccccgccaggctatgaggctccttagctgtgtgtcagctgcacaggatggaacaggtgaaagagaggggctggcagttccaggaggctcatgggaaagtccagggcagaggggagggccctctctgtcccccttcccacgctaaccgccgctcagtacacagggggcggctggtagccctcggtggtctccgcgttctgggtgaagggtggctgttggtagttgtccacagatgcacctgggtaggaggcgtaggcagtgttggggtccggagtggggtcaacgtaattctggatgaagtcgtccacgccagccttgtagcgctggtaggccagggaggccagcacaccctgcagggggagcacagcagggtacaggtgggtgggggctcccccccttccacacnnnnnnnnnnnnnnnnnnnncctccaccacccttgacccaagaaccggcccctggccatcctacccaggagaagatggaaaagaagctgaaggtgatggctgccctcacagagtcggcccccaccagcacgtccttcgggttggtgactgcccactggttggtgaggaagcagaaaccaacaaaccacaggaaggtccagagagctgggggaggacgggtgaagcgtcagttccatggaaagggaggggctttccaggactctgggaggggacgcgggcaggtagggcagggacctcccgggggagcctccacactatggaggggaggacttggaagccgggccgggagccacctccaaagtcccccacactcgggccttggcagggtgggccacagcagacagcctaggggacaaaaggggcagaggcaaagcccatctgctcgggtgtgctgcaggtccactcagcttctagctaccccaggcagggctggtgccattcaagcacggaaaaacactagctgaaaaccctttcctaaaaatgccctggaggagtgagctgctccctgcccctcccagagaggccgagaccctcccagctgcggaaccctagagttaatgcctcccccaagatcaaatggaggtgccacaggcagatacctgagaagagcaggtcaccaatgaccaggtacttgcggtcagtggcgttgctgatctgggggaaatacgcgtcgaccaccaagaagaargccgaggccaggaaggccagcaccccgatggcactgccatagcggcaggcatcctcgttgcggttgaacacgcagtacatctgcttagactcgtgggcattgctgtasccctcaccatagatgcaggagaacacgatcaaggcgaagacctgccgggaggggaggacctggtagggctggtggccgcctgaggggcacacacagcggggaccctgatggggtgtacagatgctggcctctcccactactgctgtccccttttgggtttttgttgttgtttgagatggagtcttgctcttgttgcccaggctggagtgcaatagtgcgatctcggctcactgcatcctctgcctcctgggttcaagcaattctgcctcagcctccctagtagctgggattacaggtgccctccaccacacccgtatttttagtagagatagggtttcaccatgttggccaggctggtctggaactcctgacctcaggtgatccaccctcctcggcctcccaaagtgctgggattacaggcatgagccacctcgcccagcctgctgtccccttttggaggctgacatcttagcccctccaaacttgtggaggtgagctgatgagcaaagtgcttcctgatgcaccccaggatgagaatctgcaggcaccagggggcctgcccctgggaatcctggaccggggaggggtggggaatgggcagggacctcctaggcaggggctgctcctgccccatcggcctgctgcaggaatcattctgcttaggtacctgatggatgaagggcagtccttccatccccagcccaacctcaccttgaaagaggtttaaccaagacaggccaagtcacaaagactacccatcccccgtcaccttcagcccaagtcacttctacagcacccagcctctgcctgaacaccttggtgaaggtggacaggccctcttgggaaggccatgctggcgcccctgtgtcttcacctcctggaacccctggaaccctccctggttcagcctggccagctgtctccacacaaggacttgcagcctctgtggcatcctggtccctcccagtctgtctcccaccccacagagggccctgcatgcacagggcactacaaggggactaactcaggcctgtggatacagctctgaactcagacacctggaggacccagggtggatgtaggggagctccagccccttgggaagagccccataccacctccctaaacttgaaggccaccacccacgcctgctccacctcagcaggtgtgggacaggtctgtgagcatcaggatccctctgggatggccccaggactctcccctgccagtcctgccctgttgtcccagggagctctccatagggctctggagctggcagtcacaggccccgcccccagatggagatgaagccggatctccgggatgatgggagcagggtgcccatccaggactcctggcactgccatcccgacccactgggcacctgattcttggacacagcccaggacagaggcgatcagatcccacagcctggctgggagctggtgtgggcgccctggaggacctcagaagctccaggcccaggcatggtctgggcacagcaggcccacctctgcctgccccctcatgccaccccctccagctttcagggctggctgtccaagaacaggccccctccccgccacacacacacacacacaaaacctggttttggaggtattgcccaccttacagggagggggtacatcttggggtccctcaacttcgggtgggaaggcggacccgtggcctgccccgagtgggaaggacaccctgtttccgggcgttgggtcgccccccgccccctcccttaccccacgtggcttcggaaaaccccgtcccggtgaactccccaatctgggagtcgcggcgtgcgggccacctgtccgggagccgcccccaaactcctcccactgccagcgaggcaggggcccgctccctgcggagatccggacaccccgcgtcggggcgcgaggctgggggtggggtgggtggcgggacccgggaccgggaggggacagcgggacagactgtggagggcgggaaggcggggcccgggacgctggacgccggccccgctcgccgccaggccccggacgcggccgccgccacctgtcgcgctcgtgggctaggggccccgccgggcctggcgacggagagggggtccccagggtgccctcggcccgccctccccgggctcaccaagcacacggcgcgcgccaccacctgcggctgcgtcaggaagcgccgcaggtcgaaggagccgcccgccttggccgcgccgtaggccccgctctccatgtcgccgtcgccgccgctgccgccgccgcggaacgcagaggaacctgcccggcgccccgcccgactccacccgccgggggcgtggccaggcgccgctagggaccgagggcaaagtgcggccctcgcgagcggcgggcgagccgcgggactgcgcttctagaggcggggaggggctgtggccgcggagcacccgggtccaccccacctcggggttgaggggctagtctccgggccacgccggccgcagcacggaccagaaagggtcagagagtcccccgggaagacggacgaactgaggaccgctcaccctctttgcccctgccctcccaccgcctcctctaggaagcccaccacctaccaagaacccacccaggctcataagcaacccctcccccatcccactgaaaaacccaggccacaccctggagcccctccctgcctggcctgccactctttcctcctctctggggctaagcctggggtagggtcaaagaccccctccccattcctcctggtctgggcagagccccaaggctgtgaagggcagtgtggcgtcacacttaagatggtgtgcaaggccgggagcggtggctcacacctgtaatcccagcactttgggaggccgaggcggttggatcacctgaggtcaggagttcgagaccagcctgaccaacatggagaaaccccgtctctactaaaaatacaaaaattagcctggtgtggtggtgcatgcctgtaatcccagctactcgggaggctgaggcaggagaatcgcttgaacctgggaggtggaggttgcggtgagccgagattgtgccattgcactccagcctgggcaacaagagcaaaactctgtgtcaaaaaaaaaaaaaaaaaaaaaaaaaaagatggtgtgcaaggccgggcgcagtggctcacacctgtaatcccagcactttgggaggccgaggcggttggatcacctgaggtcaggagtttgagaccagcctggccaacatggtgaaaccccgtctctactaaaaatacaacaacaacaaaaaaattagctgggcgttgtggtaagcgcctgtaatcccagctacttgggaggctgaggcaggataattgcttgaaaccggtaggcagaggtggccgtgtgctgagatcgagccactacaccccagcctgggcaacagagcaagagtccatctcaaaacaaacaaaacaaacaaacaaacaaacaaacaaacaaaaccaaaaacgaaagttagcgaggcgtggtggcagctactagcagtcccagctattccagaggctgaggtgggagaattgtctgagcccaggaggcggagtttgcagtgaaccaagatcacgcctttgcaccccagcctgggtgacagagtaagaccacatatcggccgggcgtggtggct

SEQ ID NO: 95455 - DNA, 27121 bp, Homo sapiens
tcaaattcctgacctcaaatgatccacccccacttggcctcccaagtgctgggattacaggtgtgagccaccacacctggcctcattaatgtttcagtcacttggaatggagtggagacagagtttctacttctcacagtggaaatatactagccaatagaatctgggggtgaaagagctgagcactgagactgcaaccctgggagtccaagtaatgggcactttgtctaggcttagtaagcaggtcaaggaagtggatcagaggagcagtgaaagcccgtatgggcaacttctaattatggaccagcttcctatagcaaccccatgtagaagtaagatgatttgcaggagcagaatattccatcaccagtgctcttcagcttgggtgtggaagcccagttcatatccccgggtgaattacacgtgcccaccccacaggctttttagacaactagaggaccaaagaggaagcgaatattgcatatgggctctcggctggctaaatagaaaaatgaaagatatgtggacctttcatttttggaacacttcatactgttgacatacaatataaataaaataactgcaaaagaaaaataagagagatgcagtggagtgtttacatttttctctagaataacattcataatgacgatgttgattctgttaagtaagaattataggaggccattgttttgtactgagctcctgcactaggctccaacagaccagactaaaaatcaaaatggattcactcatgctggggtttcaaaattgatattttgtcctttaatacctctattttccccctattggttattttgtgctatcagaattttgtgctattttttggcaggagatgggaggatggtcaaaagtcaaaattacaacaaaaatagtttaaagatcttaattggctttatttgtgattctagaatcaggcaacacttcacccataaaatagaaaagtattccagggagcccagcagaggaggttgggcttacagacagagaagggctgaaaacagcagatgcaatgagcaaagagcatcttcattaattttcaaagttacttttttgtggtaaggcaggaatatagagacagaacaatagaaaataactgatgagtgaacatcaggttacttcaggctaactttgtaatgtaaggattaaagcagagggaacttatgccaattaaaattttaaactggcctgtttgggaaattggccattatttctctctcttgatttctcacaaggtcagatagtgactccattttgatttttagtctggtatgttggggtctagcacaggaaattagccatatatatatacttttttttttttttatacaggatctccttctgttgcccaagctggagtgcagtggcacaatcatagctcactacactctcaaccttctgggctcaaatgattctcctgcctcagcctccctagtagctaggactataggcgtgcaccaccatgcctggctaatttttttttatttttatagagacagggtctcactatgttgcccaggctagtctcaaactcctaggctcaagcaatcctcctgcctcagtttcccaaagtgctgggattgcaggtgtgagtcaccatgcctggccctcctataatttttatttaacagaagttaccaaagaattagctctcaaagggctcctgttagatgcttttgctagcaagacttttcaaatgcttaaggaatagcagtgtctactgttacataaattatttcaaaaacagaatttaaaaaatgctcttcaacttatgttgtagactggaataactgattcccaaatctaccaaagctttaacaacgagaaaagaaaaccacaaactgggggtgtctacaagagccagaaaataacataaatgggtgcagctgattgggtatgaaatgaaaggaaaaggtgggagctgcaggcactggtgagtgtgcaccccttcttcaggaattcaaactcaaatgcttcaaaaccctgtgctggtcaaataaacaaggcctacaagttacctctgattttgcagcttctggtatatctccattacaaacatagatgtaaacattcttaggccgggcatggtggctcatgcctgtaatcccagcactttgggaggttgaggtggatcccttgagcccaggagttcgagaccagcctgtgcaacatagtgagaccctgtgtctacagaaaattttttaaaaattagctgagcatggtggtgcacctgtggtctcagcttctcaggaagctgaagcgggggatcacttgagtccaggagttcaatgttacagtgagctataatcatgccactgtactccagtccaagagacagagtgagaccctgtctcaaaataataaataaataaataagaccaggtgcggtggctcacacctgtaatcccagcactttgagaggcccaggccagcggatcatgaggtcaagagattgagaccatcctggccaacatggtgaaatcccatctctactaaaaacagaaaaattagctgggtgtggtgatgtgtgcctgtagtcccagttactcgggaggctgaggcaggagaatcgcttgaacccgggaggcagaggttgcagtgagccaagattgtgccactgaactccagcctggcaacagagcgagattccatctcaaataaataaataaataaataaataaataaataaataaaatattagtaaatccaattgaacttatactacaacttaaagaaaaaaaacagctgctaataccaagtaacattcattctagggatgcaaaaatgttttaatatgtggaaattatttttaaaatatttcataatctcattaggtcatgctagaaaaacccatatgatcctttcactaggtgttagaacttcctgacaagcagggacccagggatccagagctggcgtgggtgtggactggcagagggtacacgcaaaggtagcatccagagggaaagccaggatcagggccagcagacagcctagtaaagtgtcaatcagaaggaactggatggataagcagaaagcagataaaggccacgggacagagcccgaggagatgcttggaggcacagcctggaggttttcctgcagggacctccatgcctgctggtgttggaccaaattcggactctagctgctgcaaatgcatttgaaaacattcagcatacatgcctcataaagtagccctaaaaatgaagactataaggatcatttcttcacataagaaagaatatatcatgcaggcagcccaattatgactaaagactgctttcctattctgcttttctgaaaaccattttgtattttcaagactttttacaataaaagaaaaaagcacaatggaacctattagagaacccgaagaggagacagagggaaacaatgattcttgcaatttatatggtgaaatctaagccagtctatgcatgctatacctcaataatctgggattttatttttaattattttttagagacaacttgccatgttgcccaggctggtctcaaattcctgggctcaagcgatcctcctatctcagcctcctgagtagctgggaattacaggcaccacaataaccagataacgaatttgtttaaaaaaaaaaaaaaaaaacaacagtgggctgggctcggcggctcatgcttgtaatcccagcactttgggaggccgagacaggtggatcacaaggtcaggagtttgagaatagcctggccaacatggtgaaaccccgtctctactaaaaatacaaaaataagccgggcatggtggcgcgcacctataaccccagctactcgggagaccaaggcaggagaatttcttgaatccgggaggcagaggttgcagtgagccgggattgtaccactgcactccaccctgggtggcagaacgagactcaaaaaaaaaaaaaaaaaaaaaaaaagccaggcgcggtggccacgcctgtaatcccaacactttgggaggctgaggtgggcagatcatgaggtcaggagattgagaccatcctggctaacacggtgaaaccccgtctctcctaagaatacaaaaaaaaaaaaaattagccagtcgtggtggtgggcgcctgtagtcccagctactacttgggaggctgaggcaggagaatggcgtgaacctgggaggcagagcatgcagtgagccgagatcgcgccactgcactccagcctgggcaacagagcagactccgtctcaaaaaaaaaaaaaaaaaaaagagagaaatgggggaaaggaaaggaaaggatagccactaaaatgttaatgatgatcatcttaaggggtgggattgtaggtgacttttactttttttcttattcgtttagtgtttaaatgttatataatggatatttattacttatataatcagtgaaaaataaagctattttcattgttgtggggggaattcttggcaggtagaagtccctagaggatctgatttaatgagcacacaagatcaatatttaattaacatatcaattgcygggatgtcaactgatgttttccaaaatcrttgaagtgtaggctctcttaagtagccaaactgtcgtcggaaacatagtttacaattctcccatttaacaaacgcggaggaacagaatgattacaaatgctaaagcgcagaagacgattaaaggaggttatttatgtaccatcaaatgcttgtgtatcctgtacacatcagtttagaattctctcatcaacccaaccttgtggcaacttccaaacccctccatcatggccttctaacttttcaaacttttttttttgtaagccacttctctttccagacctctctgtagtggttcctaacgtcttccctttaaaccttctaacttgtgtttgctatttttatgacttcctcctcccagtgcctggcttccccagctggggattcaccttgctttggtggccactgttttgctcttctcgccttccctctctccatgggcctgccaggcttagggaaggccgcaggtgcttagaccttgtccaatgcggtgctcattgaacacgccgggttctcaaacaaatgttagggacagctggttagacgggaatctgggcctcccctgcttgctttccgcaacatttcttgagcattgctgggtgtccaaggcagggcgagatcccagagcagtcacgaccggatgtatgattggtgctcactgcacagtgctggggacgcacagggaggatgccactgatggtgtagggggtggggacttggcagagggagcagcatgtgtcgaggtctactggttctccaagtttggtcccagagcaaaggcatcagcatcacctgggaacctgctgaaaattctaatgcttaggcctcactaccgacctaccaaagcagacactctgggggagggaggaggggcactaaaaatctgttgtatcaagacctccaagagactccaacacacgctagagtagtttgagaaccacgactctgggagcggcctgaggatgcttaggatgagcgcagagcggaaaggaggattcgtgaaggctctctgatgccagtcaaggggttagactttgccccgcaggtgcggcctccaggtttttaagcagacgcctgtggctctcacacgccctctcccaaggcggcgtctctgggagccctggcgttccctgggcccccgggaccgagagcttacccgcgtgggactgaactcgcccacgacccccgacaccaggcaagagaggttgtgccgcagaccctccactccccagcaccaggcgctcgccgtccaggtggaggggagcacacgtgggagccaggggcaccggcggagacacgagcgcagaaggcacgcgctcaagcccacgcccgcgactgccgggactgaaggtgttgcgagccccggctccacccctagcctgcggtgcgccgtgctttggccccgcaggccccgcccccggccccgccccggcgcgcgcccggcccgcctccctaggcgtggaggagggggggcggctcagccccgcgcccgtgcgcgcgctcgcggccgggttgcagggctgggcgcgcgccccgcgtcccgggcaggaagatggtggcgagcgcgcgagtgcagaagctggtgcggcgctacaagctggcgattgccacggcgctggccatcctgctgctgcagggcctggtagtgtggagcttcagcggcctggaggaggacgaggcgggcgaggtgctccgacggccgggcgggcgggcaggccgggcgcgggggcgcgcggggtcctggcggggctgcgggcggccccagccggggaagtggggcacgggccgcgtgcgtgcgtgcggggcgccggcggtcgcccagagcggagcatccggcccccggcactcccttccccagcaggcctagggagctgcgcgcgggggcagtgcgtgacctggagacccgggccctggtggattgggagtcgggcggggggagcaggtcatgctagggtggtctccggccaagggagcgatgaaggtcaggcgcggcgagcggggctggkaggcggggctgggcccgaacctgctcggaggtggggagccccaggccaaactttctgaagttgggagggggcggggatatgcgcgccgtgggcggaggagtagggccaagggactcagggcgtccttccccagctgagcccgaggggcagcggccggtgaggaaggggagctcgggggtggaattcaggcctgggacaaagtgtgtacccgggaactgaaggaacagggagtgacgccgaaggagagaactggagtattcccgaggtgtggcttcctcagccgggggtttgaagaacctggatgggtctccggagggcagggagaggaggaactgagctggtgagttggcctcaggaccttagggaattagggaggggccctctggctttaagggaatggggactgtaacagagccccagccgcagagcaggggcaaccaacagccgtctcagcccccaagtccctgcctcgagggtctttctccctcttccccgatgtggtttcagcgggaggctcagacayctcagcggtgtggtgaggaagggtccattgggtctgggttcgtgctgcggagatggagaggacaggccacaccacagccctaagctgtggcccagaggtcaggacctccctgcccccagcgcccctgttctgctgcctccagggctccgggtcagagactctatctgctgctgtcctccggcaagccccgatacccgcgaccccttaccgcatctcgccagtctggaaggcctggtgtggagacagaagagctgcccttgcctttttttgggagaacccagagggtgggatggtgatgggggctggaacagagtcacatgagaccataactccaaaaggaggtgggggcgggggtggggctggctccgtgacatccgtggggtgtagacctacaagtaggacaagcaagtaggagagtgtttcaggcccagtgtaagaagactgtttgggcagatgggacattccragatggaatgggctgccaaagcagttagggagccctctgaccctggaatatgtgaccactctgggctaccgcccccatcccccaccacctcctcctccagcttcctggctgaatgaataggggaatcctgggctggaatgtttgaaaaagcttgtgcggtccaggcacccattgctgcttggaccccctcagctgctccctcacctgactctggggttgccaggcagcataacggggtgcatgggaaggtgagtgctgaagctggaccacccacttcaccactctcttccagctctgaccctgagaagaccaccagcaaatcactttgcctcctcccttatccttatcagtatccctcctcaagatggggataataatggcacctcccgtgttaggtgattataaagattaagtgaaaatgatgcctgtgaagcacttgcaggagttcctggcacatgctcagctgtcagtaaataaataactcttattatcccagcactgtgcattgggaatacgattcattcattcattcattcattccacaaataggtgtgaagtcctactttgtactagacactgtgctaatactggggatacaaaaataaaatagatgaggtctctgccctcatggacaggtaatctacagagagaaacagacagcgaaaaggaatttaatagaattacaaaggggttggcttagatcagggggtcaggaaaggcttctcacaggaagaggtgggcaggagagttcaggcagaaggcctgaggagaatgggcttagctgggcacccttgaggaatggacaggagggtgtggtgctttccctgaaagaaggttccattctgtgcggctgaaaggaccagagcaaggggcaagggttttattctaagtgcagtgggagagcactgaaggggtttaagcagcacaggattcagtgtgcatttaagacgtgcactctgcccatctatggagaggctgagagtggatcccagggatggtcacgaacctccagagagccacttkatagtttccaaagcttccacaaacaccatctcaccacttgttttaaatgcagcccgagaagtcaaaggaggtggggtatggggggagcatttctgtgttcaccctttctgtgactcagagaaggattctaaggtggagctacagagccaggaagtggcagaggattttaatcgcctccttggaggagaggaaggagcctctgaggccagaatgtatcccagccagaagtcagaggaccattccctaccctcagtcatcagaagggctcctgacctcaggggctgctgggggcagcctgtgaggggcacaaggctggggctgtgatgacgatgctccttggacatgcctggaagggatggaggtgggggctgactgcccaccagggcctctgctccctcactgctgcctcctcatcccccagcctcctctgggattgtccttctcagggtcagccagctcccactgcagtgcagggaccaacatgcccatctcctcccacatcctggcccccaccacagccaacctggccccgtgcctcatgccctgccctcctgaccagcttcctaactcactgatactggcttccactcggagagcctacagctctctgccatctacccacctaagcttgggaatgtctttctctgcttgtgctctgtagccagctcacatgtcaccaggctgatgcacactcagctcagtggggctgcatttacctttcctagggattccccagcctgtggtgccctccccagtgtgggtagagaatagggtctgctgcctcctcttgcaggtatctcttctcggatgggaatgggcgcccccagctcccactggccacctttaagagatcagagggcaaccgggcactgtggctcatgcctgtaatctcagcactttgggaggccaaggtgggagaagcgcttgagtccaggagttcgagaccagcttggataacatagcaagactatctctattaaaataaataaaataaaaagatcagaaggctggctgggtgctaggcacagagggcatggmtgtaggcatggggctctggcctgaaggtagctgtcagcctgacagcatgaggttcctgatgtgcccatactggtagtgggtagggtgtgggtagggtagtgggtaggttgggggaagtcctggggaggtgaggagcacagagaacccaacccagccgagtccaagatgtccaggatcttgggtctytcttgacttcacgtttgactaatttcctcctcccatctgagtaatcataatgataaagatagcagcattgggccaggtatggtggctcacgcctgtaatcccagcactttgggaggctgaggcgggcagatcacttgaggtcaggaatttgagaccagcctggccaatatggtaaagcccagtctttactaaaaatacaaaaagttgccaggcatggtggcacatacctgtaatcccagctacttgggaggctgaggcacgagaatcgcttgaacctgggaggcaaaggttgcagtgagctgagatcacgctactgcactccagcctgggcgacagagtgagactgcgtctcaaaaaaaaaaaaaaaaaaaaaaaaagtaccagtacttactgaatgctgtgcctatgccaaaagctttgcattcattcattcattcattcaaaaaatactaaggccaggcacagtggcttaggcctgtaatcccagcactttgggaggccaaggtttgtggatcacttgaggtcaggagttcgagaccagcctggccaacatggtgaaactctgtctctactaaaaatacaaaaaattagccaggcatggtggtgcgaacctgtaatcccggctacgtgggaggctgaggcacaagaatcgcttgaacccaagaggcagaggttggagtgagccgagattgcaccactgcactccagcctgggcaatagagtgagactgcctcagaaaaacaaacacttactgagtgtgtactacagccagacactctcctaggtgctacgactatgtcagtgaacaaaacaggaaaaaagccctgcccttggggaacttacaatcttctgaggagaaagacaaattaaaaaaacagtataaataaatagtaggatgagaggaaatattgtgcgatggtgaaaagcagaggaggagggagggctggcactgtaaatccagtggtctgggtggccctactgagaagatgccatctgaacaaagaattgaaggaggcaaggagtgtgagcagtggggctatctgggggagggtttgccaggcacaggggatagtgggtgcaagggttggagccaggagtgccaggggggatgaggggacgcagagaaarccactgtggctgcaggagagtgagcatgacaaattcccagatgaggtcagagaggcctgggtggagaagggggcatccagacagctcatggagcctctgtaggctcctgtaagggccttggtttttatcctaagaggggaagccactggaggtttggagcaggggagtggtgaaatgggattttaagagttgtaacagaaacaccagctgctgtgatgagaacggaatttaggggaacaagagtaggagctggaagaccagggaatccaggcagggatagtgagggaggtgttgagaagggatsgcattccacatgtattctgaaggtggccccgatgggatttactgatggagtggatgtggggtgtgagggaaagagagtcaaagatgactcctggctgggcgcagtggctcacatctgtaatcccagcactttgggaggccagggcaggtggatcacgaggtcaggagttcaagaccagcctggccaacttggtgaaaccccatctctattaaaaataaaaaattagccaggcatggtggcatgtgcctgtagtcccagcctctcgggaggctgaggcaggagaatcacttgaacccaggaggcagaggttgcagtgagccaagattgcgccactgcaccccagcctgggcaacagagcaagactctatctaaaagaaaaaaaaatgattcctaaaagtttttggcctgagcatcctgaaggatggagatgtcattaactgagatggggaagatgaagtaggagcaggttggggtcgaagagcaggaggtacttttgggcttgtggctttgagaggtctatcgagctcccatgtgagatgtcaaggaggctggtagttaaatgcctgaacgttcaagggagctatccaggccagagaggtcaatctgagatttgggatggagttcagaaacccagagactgaaagtcacttaggaagtgaaggtgctaggacaggaagggcccccagatgtgccctgggaaacaaggaagcaccaagaagaccataaggagtggcagtggagagaggagaaaagccaggtgggtatcctggaaagcaaatgcggagggtgcttcaagcaagacagagtggtccattaagtcacgctgctgaaaggccaagaaagaagaggacttagtcctggagaacttgtgagcatggaggggaaggcccgtgggagagggtttacaaggctggagacggctctccctagctgcagtgtctcatgctcagttgttactccttacagctgggggagcatgctcagagaagttagggaactgctggtgagttggcagagctaggcccagagccctggaggctctagagtgttcacatggtggcccctgttcctccgtccattctacatctcatccatcagacaccagctaggtgtccgtgtgtgccagctgctctgctgggccctggagagatggagctgacatgtctctcatcaaggagttcactactagaggaacatccagggccttggagcccagcccattccactgcagggcaaatggaatggctgcatgccaggggccttggagctggatctgaaagcatggatgggatttggtcaggcagggcargtaggatgggggaacggaggaggaggtggctggacatgctgttcagtcaccaccaggccatctagggaagtgcctggatttgaggagaggcagcaggtaccagagcacttagagccaggaagcaggggcgcagcagcggtagaggcgccccgctgcagggatcccttcaaggaagaacctgctgcacatgcagcgaggtgacagcctccagctgtgggcaccttcaggccctgcttcagctttcaagccagggactgagtgtggaggtggctcagggctcaccagctccaggcagtacatgtgccggagttttcccaggagccggccaggacttcctcgaggctgtgctggaggtggaygctcttcttgcccctctccttgcatggccgtctcctttgcggtccaaagcctttccctgccagctcctgccccatcgttcacaggggtacccgcagtgaatctcatgccctctcactctgtcttgatctgcttcctagaggacctaagcagtattggggtctcaggcttcacctccatcatcccccatgggcactcctccttcgctgtgaggtggcctcagtcttcccacatggaaatgctttggattcatctggaagttagagtcttctgaagaccactgtctccttccagccctcggtgggagtgctgggtcttaggtggacacttgtaccctcggtggggtctttgcacccttcccttgggacacacgtagatatttattttaacatctgctgaaaaagraagtggtatctgagtccagaacagaaaaccaagcacactgccatgtaatctgagagccagtgggggacgggggtgttggtatgatggagggaggcccagtgcgccctcagtggctggccagggaggtgctcccatggtggtactgattgtgcggagtccttaggtgaaaagcgcttctctgggtaaaaggtgggcaggaacatctaggtctgagggtgcccccaaccaagatggaactcaaggaacaggaggaggtgagggtctgccccmgtgatgtgtctgcatctctcttacagaaaggaaggcagaggaagccacggccactggaccctggcgarggttccaaggacacagacagttcagcagggcgacggggcagcacaggcagaaggcatgggcgctggcggggccgtgctgagagcccaggagtgcccgtggccaaggtggtacgggcagtaaccagccggcagagagccagccggcgggtcccacctgccccaccyccggaagccccaggccrccagaacctgagtggggcagcagctggggaggcgctggtaggggcagctggcttcccaccacacggagatacagggagcgtggagggcgccccccagcccacggacaatggcttcacccccaagtgcgagatcgtgggcaaggacgcactgtctgcactggcccgggccagcaccaagcagtgccagcaggagatcgccaatgtggtgtgcctgcaccaggctgggagcctcatgcccaaggctgtgccccggcactgtcagctgactggtgagggacaggggtgctccagcccttcccaggcgggggcaggggggtggcatggcccggatcctcacccctatctctctgaggaagaaagagccaaggggatcctacctccctgcctaagtcttcatccagtgtacttactaagtggcagaggcagagtggggacccacgagcatggagctccaagtctaggtttcttcggaaggcaggcagctccctcttcccatctcacccccaccctgtgacctagggtgggcctcgccaacgcctgtcctctgctctcagggaagatgagccccggcatccagtgggatgagagccaagcccagcagcccatggatggccccccggtgcgaatcgcctacatgctggtggttcacggccgcgccatccgccagctgaagcgtctcctcaaggccgtttatcacgagcagcacttcttttacatccatgtggacaaggtactgtggtggggagaggccaaggggtctgggatgagcagagcagaaacagaaggttgcagacagacagagtctctgacctggcccaggtagcctagagagggaaactgaggccctgaacaggggrgtggcagcacgagccagctcagccgcttaggggctggagccctgccctgtgctttcctcgtcttgtgtcccttcactctgtcctggggtgggattggggatggcgataacactggaggctagctgagtgtctcctccccaccagcgttccgactacctgcaccgggaggtggtggagctggcccagggctatgataacgtgcgggtgacgccctggcgcatggttaccatctggggcggggccagcctcctgasgatgtacctgcggagcatgcgggacctgctagaggtgcctggctgggcctgggacttcttcatcaacctcagtgccactgactatccaaccaggtgtggggatggggctctgagtcctctgcatgggaggggacccctgtctgggcacctggggttggagggctttggtggaccttctctgccccataagcgtaactctgggatccgccctgctcagacatgggcccctgggccccagctatgttttaggggaggggttggtgtaagatgatctaagaattgagcatgataggagatggggaggaggaggagccagaggtctgtacctggtgttctgggtcagacagcaaggggcaraggaaggatggggtggtcttcctcaggggcctctggtgctcaccaccccagacatcagccaggggtasggcacatggccagccagcaatcaggcagagaagaaaagccagaaggtccgctctgggccagtgactgagcaactatctcatgtggctgcctgtcaccccattccttcaccaggaccaatgaggagctggtggcattcctatccaagaaccgggacaagaatttcctcaagtcacatggccgggacaactccaggtgagggggtggggaaggaggccctggccccagagtcttgtcccaacccctcccacacagttgggctcggtggctccagccctgggtttcaaagcctccacaccagtcacaggttgaggagtgttggttgccaggcggrtgaaagagcttagaccccaccctgcaggatccccagccatggcctctctgctgcccacaggttcatcaagaaacagggcctggaccggctcttccatgagtgcgactcacacatgtggcgcctgggcgagcggcagatcccagcaggcattgtggtggatggcggttctgactggttcgtgctgacacgcagctttgtggagtatgtggtgtacacagatgacccgcttgtggcccagctgcgccagttctacacatacacactgctcccagccgaggtgggtagcccagcaggcatgaaggccagggagggcgtgggttgggctgcctgcagctcaccttccactctcccttgctgcttgcagtccttcttccacacggtgctggagaacagcctggcctgtgagaccctcgtggacaacaacctgcgggtcaccaactggaaccgcaagctgggctgcaagtgccagtacaagcacattgtggactggtgtggctgctcccccaacgacttcaagccacaggacttcctccggctgcaggtgcttgcccgaggccccaaggcccctggctaggtcttctcccctggcttttcaccaggaaaatggcagggtgggccagtaagagaatctggggggccacggcctgcagcaaccctcaggggtctggggctacaacagcagcaggaaaagcygcaggaggctgagctctaggcagtgctgaggggccagccccaccatgccctctggggcttccagagcccttcaccctccttgcctctcccactccagcaagtctccagacccaccttcttcgcccggaagttcgagtcgactgtgaaccaggaggtgctggaaatcctggacttccacctgtayggcagctacccccccggcacgccagccctcaaggcctactgggagaacacctacgacgcggctgatggccccagtgggctcagtgatgtcatgctcactgcttacacagccttcgcccgcctcagcctgcaccatgccgccactgctgcacccccaatgggcaccccactctgcaggtgagacccccttctgacatacagcaggcccttggggtgtggtgccctagggggaggccaaccagagagtgacgtcccctgcccacaacaaggccccagtctgaagcagggaaaaatgcaaataccgaaaagacggctagagccaggcatgcaggtgctgtgggggtgagatctggggaaaggaagtgcctggggatgggactccccagagccccctccctgggactccaggccaagtcaggtgtgctgatggcatctccctttctccctgctggcaccttaggtttgagcccaggggcttgccgtccagcgtgcacctgtatttctatgacgaccatttccagggctacctggtgacgcaggcggtgcarccctcagcccasgggccggcagagacgcttgagatgtggctgatgccccaagggtcgctgaagctgttggggcrcagtgaccaggccagccggctccagagtctrgaggtgggacaggtcccccacttgctttctcccaacccccacccagacttggggtagtgggaagagargracagacaccaagggaggggtaaggttatttttcccagtcatggcagccatggtgatgcccccatgcagacatcctgtgtcaccccccagcctgtgcacactgaggagcacctcctggttggggtatgcagaggacatgcagggagcagggagggaattatcagttccactacaacacaagcccaatcttccagactacagagatttcgcctagaggggcagggacattcgagttgggccatgaaactacacttctgagtggctcctcatagtctttttttttttttttttgagacagtctcactctgtcgcagtggcacaatctcggctcactgcaacctctgcctcccaggttcaagcgattctcctacctcagcctcccgcgtagctgggactacaggcgcgcgccaccacgcccagctaatttttttttttgtatttttaatagagacggggtttcaccatgttgaccaggatgatctcgatctcctgaccttgtgatccacccgcctcggcctcccagagtgctgggaatacaagcgcaagccaccgcgcctggcccctcctcatagtctctttctcagaggctttggcttcatgtgggaatggtctctgggcaggactttgaacctcatccctgccgtattgtccccaataagggggactgacctccactgcctagcagtcagaatggaagcctagaacgaatctcagagctgggagagatattaaaggtctcctagtctgaccccttcattttgcagatggggamactgaggcccagaaagagacagtgactggcctgagattacacagtgagaggcagcttcagaggagggagaaggacctttcccccacactcctgcccagctgcctctctctctacaggttggcactgattgggaccccaaagagcgtcttttcyggaactttggggggttactggggccgctggacgagcctgtggcygtgcagcgctgggcccggggccccaacctcacagccacrgtggtctggatcgacccaacctatgtggtggccacatcttatgacatcacagtagatacggagactgaggtcacgcaatacaagcccccactgagccggcccctgcggccagggccctggactgttcgactccttcagttctgggaaccgctgggtgagacccgcttccttgtgctgcccttgaccttcaaccgcaaactacctctcaggaaaggtaagcgtgcagttctcaaatgaggcccagaagccagacagaataggactcgccagagaggtgacctcaagaagccaaccatcagagctgactcccatccctagagtcagggaagcatggaagggctggggccttcatcttctttcctgtagcatgcagggtcctgcactgcagtgtggtggaaaagggagctttacagtcatgcacacttggtttggaacataactctcacaagttcattggctttttgtccttggaagttacctggccttcctgggcctcagtcttagcacgtgaagctggaatagtacacctatcagggacctcctggttcatgcaacacaaatccactcaacctagcttgagttaaaaaggggagaagactggaagaatgcagaggtctccttcacaaagctaggaaatgtctcaggcctcactgtgaaccagaggtgctttctccatctctctggggctatcttgttcctcatcctgtcctgtctctatgcattggcctcaggctctggctccccatccatggcctctcagtgcaacagacactgaccagagacttttagtccccaggtttcacattcttgggacagcaaatctgattggctatcccagtccactgtctggccaggtgggcagggtcatgtggctctctgcccatttggctgaggctaagggagcaggctctgaacagagacacaggctgggcaaatttcctgcaagggagggcctagtataagtaactccccctgggagctatgagggatgagcctctggagggaaagtggccggtatgcaggaggtgatcaattggtaggtgtttccttcccccaccacgtcctatcacaagaaggtggttaagaggtggggtaccctagaggaggagggggtgctggtggggctgcagcagatccagggcaggcaagctgtgtcccccgcacacctggacctcccagtcaagggaagaatggcaacaatgcacagcaggtagggacaggggctgcgcctcaaggacaaagtcagaggaggtgctctaagccaaggggacaaagctggccattgtctgtgcatgaagagctgaagtgcccgagtacaggcttctgagggctctaggagccaccaatgatggtcaagaaagggtatgggacacaaaccagactgttcccttttctaaagtgccttgaacccactgctttactgcatcctaaagttgggaatctaaggcttactgccttgattttataaaactcagttttataggcacagaaagtcccttggattagcccaaggtcattcagcaagctgtgactcagaagtagggctgtgacaggaactggggtacccagacccaactcctgggtctggcctccacggagtctgttgcagggggtgtgcttactgcctgctctgcacccacagatgatgccagctggctgcacgcagggccaccccacaacgagtacatggagcagagtttccagggcctgagtagcatcctgaacctgcctcagccggagctcgcggaggaggctgcccagcggcacasacagctcacaggccctgcgctcgaggcctggacagacagggaactgagcagcttctggtccgtggctggactgtgtgccataggcccctctccctgcccctccctggagccctgcagactgaccagctggagctctctgtcccccgaccccaaatcagagctggggcctgtcaaagcagacgggcgactcaggtagcagggccccagccagtacccgtggaggacccgggaaattgcaccttacagacagtggaggggtgtcccctcccacaggcaagaaccagaggcccaggctgcacacccatttcagccatcaagaacccacacagacggcagggaaggtggacacagtatgaactactgctgatgtctctgttggggatcagagggctggcgggaacgcgagaagggcaccagcagcattccacacccagctcttcctcaccttcctgtctagtttgaatttcttttttttctttttttttttttttttttaatttaaaaaggaaaatgggtggttgggagagaaactagaacagaagatgtgcaatagggctcagagcagccccaggaagtgggccatgtctgtggggagcagkggcttgctgagcccacctgctattgttctgcacgaggctgggcctgcctcactctccagggcctcatgccccattctgggcctgtggtgctcgtggctgaggctccacagggctgcaagtgccctgccaggctctaaggcccgaagaacaggtgatatcgggggcrctgcagagctgggctctagcrggacagttcttttgtagccaggggaccctagaagtggggtggggcggctccagggctttccagcataccctgcccctggatgggaaaggcagggtcagggcccactgagacccatgcagagtttccaggtgtgcactggaagtgaggtcacatgagcagcgtgggaagaagactctgtcaagactctcagaagaacctggagtaattgtgcctgaagctcagcgtgaagtctgaaatatgcaacagaagaaatatatctctatctctctactctgggctctgtgtttttcctcctgggtgtcaggaagccatcaccattcattgggccttctccagaagtcttagctggtactttggtagccttgagaaggtaaagatctcattcctccagattaagaacagtttagaatccacccagagggactcaagaacccatctagcctgggtgcaggggttcacgcctgtcatctcaacactgggaggctgaggcaggaagattacctcagcccaggagtttgggaccagcctgggaaacagtgagacctcgtctctacaagaatttttttttaattagccaggcgtggtggcgcacatctgtagtcccagctactcaggaggctgaagcaggagtttgaagctgcagtgagccaaaattgcaccactgcactccagcctgggtgacagagtgagaccctgtctcaaaaaacatctaatccagctcctttttctgaggggtaaacaggcccagagaggctcaaagackwcttctttgccacccagcaagccaggggaccagcaggacctgagcttagtttgagagccctgacccagcactcccacccccaccaccaggccaggctgcagcaggtgctggcttctctatccttggccttagcagggtccatcctagaagcctggccctgccacatggggcaccttcaacagaggcaatcccagccatggcctggtcgttatgattggagctttttcttttcggggcaggagcagcagcagcctaggtccctcgtcactgtcctaggactcatgttgaaaagggttgtccatcctccctccctttcccaagcctcctctccccctcccactctcctaccattgacagccagagctcggtatcagtccttcacagcttgcttaatgtgggagcaagggtgaaggtttctagacctctaaagtcaccctatcagccagccacactgagctcagcttggggaacaaattcctgcccaggctgccacatgtcaagttctcctagttgccaggagggggcactcctgacaaccaaccgataacagcactggggtttttgtcagctgccgtggtgctaaccatgcctgtagtatctcaatccttacaactcttggagggaggcatttttattatcatcatttagcagatcagaaaactgaggcttagagctgtgaaatgacgagcccaaagtcacagctaactatttgatggtggcagcagccttcagaaagaggcaggaagcctccagagccactcagtcactacactctccggctcgcataagagcctggctgggcaggtaagcaggaaggagctaatggcaagaattcgaaggaaaaggtacttaggttcagaggctaagataattcgttttttctggctcctgttttagtgaacatctgaagctgtaccctggttctccagaatgttgtggtttttgtttcccaatatcaactctcaggtcaataaggaggaaaaattaacaactaggttcagcatattaggcacaggcagtaaatattagaacacttagactctgctggccaagagctcacaaactagcctgtgggtttaacctgggctatggctgtgctgtgttaggctagcacaacggttttcaaagtagtagtagtatttttagagacagggtctggctctgttgtccaggcacgatcacgatcatagctcactgcagccttgacctcctgagcgcaagtgatcctcctaagtagctagggtcacagatgtgcacgaccatgcctggcatgcatgcattctttatttatttatttatttatttatttatttatttatttatttatttatttatttatttatttattggcagaacaggggtctctccatgttgcccaggctggtctcaaactcctggcctcaagcagtcctcccgctccaacctcccaaagcgttgggatgacaggcatcagccactactcctggcctcaaagtaccattaaaaaaaaaaaaaaatcttaggtaacacatgcactcgccgcatccctgtccttctccaccaccatattagatcaggtcgtagttccccattattgtcacctgctgtaaacatttggagtttacattcttcaactcaagtgagtcgtgatcctgacagaggattctgatttaacggtctgaggtggcaacccacagtggtatgcttttaaagctcctcaggcctttctaacaagcaggcaggcagaactagggaagcgtaaccccacccctgctgctctggcaggcctgtcttggccccactgagttggaagcactgcaggacccaggaccagcctccaggactcctcctgacaggttcagagggcagatttgggggtggaggtgctcctctcccattctctcccctgtccaggtcactgaggtgagagctcagctttgctgcctgagttcctggcagacagtgttctctatcccccacctttctgtagggttagctcagcctggaggcttgggttttttgaggtttctttgaaatccactcctggctgggccactggggtcaaaatcaggatttgggccaggcaggacacagagtggggrcggggagcggccaaaggcaggctgggcccccagagctgcacaataactgctttggagggaggaggagagcctgggcagagaggcttttgtatttcatggcctggcgtacccagtttccagggcaaccatggacaccacggttctgttagaggtggaagccaagaccagaagacagccaattaacatccagagcccagttatctgagccaatgggaagtggaggtgggcaatggggctgggagggatctgggactgagaagtgcagagatctgggcgagttggagtcccactggctgtcaggttcagcagaagcagggcctgttccccscaacccctgctctgaaggttgtagtgggacactcatagctgccaggcctgcagaggcaggagaggctgagctcctggaaagctgcttacagatgcccctgctctgaatgaagctgttcctctgggccagggttcccagggaggggtgtggcacctcggggagggtcagccctgtggccctgctggctgccctcaagactgatgccctttcttggcatcccctgccactgcttctccgtgtgcagacatcaccatggacaacagcctcctggccatagtcgtggccaccagtgagtacctactgccattccgtgtcccaggggtggggcagaggcacctttggcccctcactgtaggcaaagcccagattcttcatctatagggtcacctcaagcaacagccctccccagccaagacttgagaagtatgctgcacatggctggtctttgatccctctggtcccttccctgtgccaggtcctatgatgccacaatctttggtaacaagaggggctgggcaccaggagctgttgagctgggctcttgggtcctttcctgcctcctcagatccagtttctcagggtatctgctccatcccctccctttgtgtctctgtaaaatctcccttacacacatcaccccctgggctgcaggcagggaagggacagggctactctgctccccctcacaaatctctgccccagggacttgatgccgtagcaaaaagggatgctgcctgcacctcagtttgccttgcttgtcaagctggtatcagtaccagccaggtcattcctacaccagcttctggagtgaattccaatctggtgaggagatgggcctgcacatgctgggtccaggctgccccctgacggtgcctcttgggggaaggcagcctcatccacagtgttcatcatggccatcctgctgctgctgctgctgcaccagcgcgacccccagtgctgccaggtcctctgcgcctgccacttcttccggagtcccagccaatacgtaagcaccccgatccaccaaccccttgccttcatgccccccacccccgacccaaatcctgacaaaagggcacctgtgctctggccaaggagaaacaagtgttcagtatggaaaagaaagggcctttggaatctttctctgcagcatccagcctgggttccctctgagtcaggggagcagtgtggaaagggttaataacatctaggcccctccctgaccattgttaaacataactcagtgcaaggagctgctcagtgaagacaaggtctttttccagctcccaggggaaagtgcagagccccgacttctggggaagggggtaagtggcaactacagcactgtcagtcctctccccagggacagcgtgccatatggcatcctgtatagaaaggaaacaaaatctgagctgcagccccccagtctctgacaccattccccaacactgggcaccagacaggatggaggggtagggacaggaggtggttttctctgactttcccaccaaaggtcatgagacctggctaccagacagtgacagaatgagctactggccagaaaggagtggattctctttacaccctagtgcatttcagaaatgctgagggtctgagctttgtgccttggcccaggtggagaggattaaagggatggagaaaggggcatggagggaaataaagggtttggaatctgctgtcttgcacactgaccctgagcttcaccttgagctgtgcttcatgatcccagggctgcccgcctccctacttcagcaccatgggatgccacaccgaggtccagccagtggaaaggagccgagagtcccaagggatacaagtgaggctccctgggcctgccacctgggatgggggaaaaagtgtgtgctggggttctgaagccaggcaagggacctagcgtggttaaggggactaaaaagaacgcaggggaggggaaggatgggatgaagactggagaggcttcttggaggagagggaggagcgcaatacccctgaacttaggcttgctctgcagaagaggacccagaccgaagctggataacgctggtgcatgcctccctggctcccttggctttttttggtcacagggccactcccaggggggtgaggtattctgtgtggggctgcccaggagccaccagctgcccctgtggcagccagctcgcctgcccagctatgagagtgttcgaaagaaggaccggcagcagcagattcaccagctgattgcacagagcttcgggctccgggcctgcagagaggtgaatgtccagccttctcagccctgggtgccctgggtaaccgagcttttcacatatcgcattttaacacacaatacccaattagaggccctggggtcaggaaaaggaccactagtggagaactcaaggatatgactggagaccccagttcacctctttgtgtagatggtgcagaccccagcccaaggaggcctaaccagaggggtttccatggagccaacatctccagcggagatgcagaaagcaacagtccaaagaaagggtgttgcatatatgggaagagggcaagaaagtggctaatgcctttgctctcccatctctccagctgccaccaagctatgaggaagccataaggtcactgcctccaccaccggccagctgtggctctactcagtcatcccaggaagcagccacctgccctgctcaggggaacaccacagtgtaggagggagcaaccacctctgtcctgcccttcccctttctccaggagattggaaaggagagcactgagcctgtggaggtagcccccatcaatctcccctgcctaaagactaccccagctgggccttggtacctgatgcccccacacagggtgccaaagtaaaccccacaaaccccaggtcacctctgtcaaggacctgcaggaggtgaggaatctagggtcatgtcctgggaaaacaagatgacatgttcaaggcagaactccagaactgggaggcttctctgacctcaatccctggagtgtctaccttcagggcacagtagagtccctgaaagaagtcactggacccaacagcccctctctggggctgtagccaaca

SEQ ID NO: 95456 - DNA, 60727 bp, Homo sapiens
gagctctccaagtgagcaattcctgtcccttttaagggctcacaactctaaggaggtccacgtgagagggtcatgatcgattgagcaagcagggggtacgtgactgggggctgcatgtaccagtaattagaacggaacagaacaggacagggattttcacagtgcttttctatacaatgtctgtaatctatagataatatgaccaattaggtcaggggtcgatctttaactaccaggcccaggtgtggcgctgggctgtctgcttgtggatttcatttttgccttttagtttttatttcttctttctttggaggcagaaattgggcataagacaatatgaggggtggtctcctcccttatcgccatgttgaccaagctggtctcaaactcctgaccttggcctcccaaattgctgggattacaggcatgagccaccgcgcccagcccaacactttaattttaattgcgtaagactctcttcagacttctggcctccagaactgtaagacaataaatttctggggttttaagccactacatgtgtgcaatttgttccagcagcaataggaaactgacgcactgcttctttctcaggactagatgcaaacctccaggaggccttctgcaacacaccttgggtaggtgcctctcccctagccttgctcacacagcactggccgcactgcaggccattgtcagtctcagggttggtgttttctcctagacagtgagctcattgagagcagacaccatgtctcattcatatcatgcttgtcagcaagtagttactcaatgaatgaatgctgaaccaatgaataaaaaaagaaagttaaattagatttggtttaacactgggtctttatccaagacttcacagttgactttagttcttgactttgacccaagaaaagtaaaatattacaccatccaaataaagatttttgtcctatcctcttacaaaagcaaggctttcacagtttttttggcagttgctgggattatggcttagttttcaatttggggatgtaagcaagaaaatactgatcatttaaaaacatgtctgcctgtgcctgcagcaattgttagtcgtgatcgagataattttactcagctgggtgtggtggctcttgcttgtgaatcccagctctttgggaggctgaagcaggaggatcacttgagcccaggagatcaaaatcagcctgggcaacacattgagatcctcatctctacaaaaaaagaaaaattagcccagtgtggtggcatgcgcctgtaatcccagctactcaggaggctgaggtgggaggatcacttgaccccaggagttcaaggctgcagtgagctatgattgccctactgcaccactccagctccagcccaagtgagagtgagacagtctcttaaaaaaaaaaaaaaaaaaaaagataactaaaagataatttgactctacacagcagttcaaatcaagttccttattttcactttcagtttgagagtttgagaatgagaaacatccgtgtttagaacaatttttattagcctttttttttatattggctactggatctaattggcttgattagcagaatatacacattctgttccaagtcatttcaatatctttgaaaattgaaacttccttcctcaacttcctctccccttttctttctgtggctgccagcggtctctcttttttttccacctctccttcatgatcactgcatttcttattagacagctcagttctcaaacacacagtgaaggaaattctttaaaagggccattttttatttactacttggagacagtcaattacaacagagagctatgaaaaattacaccagagaaaagggatttgctcaaggtcattgacagaaaaagcactagggctggattctttccagatctgacactgaagttgattccaagcctaagtaacctctttgcactcattttttttacagtgaaaacctcatcaaacacattagttcctgtaactgattgaagcctccctcaggcatgttaataaaaaattttattaagagaaataatatacaccatcttagaaaataatataagaaaacagctttttttttttttttttttttttccgagactgagtcttgctctgtcgcccaggctggagtgcaatggtgccaccttggctcactgcaagctctgcctcccgggttcacgccattcccctgcctcagcctcctgggtagctgggactacaggcgcccgccaccacgcctggctaattttttatatttttagtagagacagggtttcactgtgttagccaggatggtctcgatctcctgacctcatgatccgcctgactcggcctcccaaagtgctgggattacaggtgtgagccaccgcaccaggccaaaaagagcttttttaacaaaagcctgttctctgccctcactcttcctcccactgctatgccccaaagaaaagcttttttaaaagttgtggaaaaatagacataaataaaatatatcattttagccatttttaaggttatggttcagtggcattaagtatattcacattggtatacaaccattaccaccattcatctccaaaaacctttcaccttcctaaactgaaactctatacccattaaacaaataataactccccattcccccaccacacccccaacccctggcaaccaccattccactttgtctctaagaatttgactactctaggtgtcgcatatgaatggaatcatacagtatttattcttttgtgtttggcttatttcacttagcacaatgtgttcaaagttcatgtggactgtagcatgtgtgggaatttccttccttttttgaaagctgaatagtattccattgtatggatctactgcatttgtttatccattcaatcattgatgaatatttgggttgtgtctgtcttttggctattgggaacaattctgttgtgaacattggtacacaaatgtttgttggagtcccgactttcaattattttgggtatatacccagaagtagaattgctggatcatataactcatttttaattttttgaggaagcaccataccatccactgtggtggccccattttacattcccaccacccaatgcacacgtgtccagtctctccacaaccccaccaatacttgttattttctggttttttgcgggtgttctttttttttttttgagacagggtcttgctctgtcacccaggcaggagtgcagtggtgtgatctcagctcaccgcagcctcaaactcttggggtcaatatatacatacatacatacatatatatatttatttggtgaaatatctatttaagtccaaagagaatcatttgaactattgtaacgatttctgatttatcttcttctgctacttgcctctaaatgacatacttattttgccagttttagattttctgtttgataaatgggtacttgcaccccatctctcctccctaagtgctggtactatagttttattattatttttgtacataatgacataccctttttttttattttatactctcccccaccccttccctctcaactactatcagatgtaacttccaaagttagtgatacttacatttacattctattctgtaactgtgactaggtcttctgtaggttgatgttatgaaagaaaaaaaatcaataaatggtgtttacattttgagcctgcttttgaagcacagaagcaagacatgggcaaaggggcgggaataagggctttctcatggtagccaatggcatgagccaaattacagggaccataaatcatgcaagtcacatgcagcataaaggagatgtgatggctcaggcagaaggccccttggggagcaacggggaatttaattggttaaagggaagggaagggaagctggagagcctggatggcccactgccctgctccccacttccttatactagccaaagaatgcgggtcaacgtgattcccccaccatgactcacggacttccaccagccgtcttgactttctcccagccctcctccccatccacagaaccagtgcctaccagggctttgcacaaataaaacaattctccctcctaaaaaaggtttgcaattcctacacagaggaaggtcttagagtgaagacacaagaggaaggagaggatggaaaaagaaacaatcactgaaaactggccgactaccagttctgtgccacctactcaattcttacccagccctctgcgtgaagttggtattattatccccatttgacagataacgaggctggagaggccccgtgacttgcccaaagccacaaagagactactggcagagctttggcctatgtttaagaagctgaacctctttgggattcagtttcttcatccataaaaacaaagacacattccaagccatgcctgttccttgcagggtgtttgtgagggtcagagaaaatgtccttgaagagcctggcatgtacaagataccctgaaactgatggctatgatgccacggcctgtgcacctaggaagagtcaggaaagcccagtgtcttgaaaagccgaggctggagcaaagttcaaggaggaactcacttctctcccactctaggactgaccctcaaactagccagaagagtggaaggacctacaagatcagtacccaccccacacttcataggccaagagagggacagtggtttacccagggtcacccagcatgctagaggctaagcctgccagccacggctgggaacccagacttgtgaatgccccagccctccacattccctggtccgctatcaaagacagttagtctaattaggaaagcacacccttgcaggcccagcctccggtgatctctttgttcctctgtctcttcctgccccaaccccacagaaactgaagtgtggggaccctccctaggaaccggggttccagggaggatttgaggtcacgctcaagatcataaagaggcccagcatggactccttctcatgacccaagtggagccagagttcccagataagggcaaaggtcacctcaggccaggctccactctcagccaccccttctgcctggcagggtttacttcatctcctccagtcaggagaggggaggtcacactgccagggcctttgccccattcttctccagctccttctctagaggaagagtcatggctaggccgaggcagtgtggacctggaacaggtataaactgtgctactctttggtgcccagtgccacttttcctagccaggaccagagctatcaccttctctgtcccgcagctctgcccaggtcttagtaccccactcacccctgggcctcaggaaccctaaggaggggcatagggttgctttccattcacacctggggcagcacagggaactgtgccacaggccccaagacaggcagatggaggatgaaatacacaggtcccagtccctgaggccaccttacgtgtccggcccccaaccctgtgcagaaggtcaaggcagaggcgccgaggagggatgggaggatgcctcctgtgagatggggtacaactggtgttccttctgaagctgacatctggcctcagctgggactctggcgccagcgggcccgcagggggctcacccgcgacaccctttgttctggctgcctccccaaccccgcggggccctctgctccagctggcatgcctcaaggacgcttcgcgcctgctcctttggcccccggctcgcaagtagcggggccagcacgtgacccgagggggcaggggatggatggatcttgaccttgccatctggcccctcacggatgtgctgctggctctccctctaggaaatcaacaaatttttgcgcttctaacatccaggcccctgaggatggtcgcgaggaagatctgtttcggactgcagctggggccttcggatccagaggaaaccagggctattcttcgagggtgggagggggagggccgcggggtcggaggggaaggtggccccgcgcgaagtcgccgccgccgcgccccgccccgccccgccggcggagaccgaatccgccgcaccccataggcagaggccaccctccccgcctccccgcccgctgcgcgcccgccccgccccggctcactttaaaagtttactcgggccgggacgcagggcaaagcgagccatggctgtctacgtcgggatgctgcgcctggggaggctgtgcgccgggagctcgggggtgctgggggcccgggccgccctctctcggagttggcaggaagccaggttgcagggtgtccgcttcctcaggtactggccccccgcgggaagagagggggcggggcagttccccgggagaggaacttggaggtcccggcgagcttcggaagccccacctctggacgagtgcactggggggaaggtacccgcccctcccccgccccccgccagcacctaggcaataggaaaagctggcttggcctggtggacttgggtggggagggggctttggttggtggctgcagtgacttcgagttctggtccaagactctcgattccttctcctttatgggcacagagggcaaggagtgtgggctttaaggagaatattccgatggggaggggcaagggccaaggcctgggctgtacccccaggacactgcctctgagttggaaccccttcatgggcaaacttggggatcagccccagtctccccgacccaggccactaaacttagcagtctcctgtctcctcatcagctgctcactaacatggctttaattctttgctgcctactcctgggcctatttccttctgtcctcagtgcaaggggtgggatggaagctggcaggcagaggatttcagttcccagtagcttcactgcctctgcagcagcacagtaagtaaagctgccttcccggtgtgaccagtccttgggaggaccccgtgagatggcaaatgtgaaagtgcttgagacacagagagcaggctgccactcatgttatcagggctgttagcttcagcagcaccactggggagccctgtgcactactgagcctgtcctaccactcaactcggccagatactaagtctatggtcaggacagcactttcagcaacatcagatggggtgtgggcctggacatggaaaagggagaagtcagaacaaagctgtgtctcagagaactagatttgtttttgtttttaaaaaggctaagtaggaagagttggagggacatgcagactcctttttggctagaactccaagatcacactttctgaacttgctgatttctgaatgctagaaagcatgcaatgccttaacatcactctgcctaatttgctgagaaaactaagtggatcaaggctggtcagtagatgggattgagatgaggacagtggggtcctcttcccagtgaccctgggaagtcactcactacttcccagggtctccctagacaagttcggccctcccctgaccccctagtctcttaagcctctcctctggactcatggctgccccctcaggctgggaggactctgaggaaagttacttcccaaagtgtacatattttatcacactaaatcaggccacaggggaagtctctcagcctactctggctcaggaggctgcccaatagaaaacaaacaaacaaaccaataaataagtaataaatcaggccacatggcaacatttctgacctttgacttttttttatctataaacaaaacaggtcacttacctgctacagccctgggacctctgagagcaccaagcttcagagaaattcttattgctgtgtcaggaggagactcatttatccagacagatgattttctgagtgtttggcctactttctttctgccccttccactcccttgtgcctgcacccttattgtctgactgtgatggttttacctgatttctctcctactttccccttcagaagcctcagggctcaggccaggcaaggtggtttatgcctgtaatctcagcactttggaaagcagaggtggtaggatcacttgagcccaggagttcaaggctgcattgagccrtyatcatgccactgcactctagcctgagcagcagagcaaaacctagactcaaaaaataaaaataaaggctgggtgggtggctcatgcctgtaatcccagcactttgggaagcccaggcaggcagatcacttgaagtcaggagaccggtttggccaacatggtgaaaccccgtttctactaaaaatacaaaaatcagccgggcgtggtggcatgtgcctgtaataccagctactagggtgtctgaggcaggagaattgctccaacctgggaggcggtggttgtagtgagccaagactgcacctctgcactccagcctgggtgacagagggagactccatgtcaaaaataaataaataaaaataaaggccaagcatggtggcttatgcctgtaatcccagcactttgggaggctgaggtgggcggatcacttgaggtcaggagttagatcagactggccaacatggagaaaccccatctctactaaaaatayaaaattagcctggcgtggtggcacatgcctgtaatcccagctacttgggaggctgaggcaggagaattacttgaacctgggaagcggaggttgcactgagctgagattgcaccactgcactccagtctgggtgacagagaaagacttcatctcaaaaaaataaaaataaaaatgaaaaaagaagcctcagggctgaaaccatcagcaaacattcctgagaacagattctgcgtcatgctagcacatgctgtgcatatagaggccacagaactcagtcctcaccctgccaggaacttgcagcctcgtaggaggagaaataaatcaaggtgagcactattcggtgttgcaagtgccatggtgaggaatgcgcttggactttcgtcctctgttttctccgatctgctcacacacagcctgctttcctgttgcccaacacccaggcctattacttaccagaccctggttttgcctgagagaaaagagcaagggctttgaagttagactatcctggatgacagccctgggtcctctccctgttggttgtatgacctcgggcatgttatctaacctctgagctagttagttcattacttactaccttcttgctgtgttgttgggctgatgaataaaacaagcttgctcttgttctcagcctttcctttgaggcagggctgatccctggaaacccttgactggtgtctgggtgggaattctgacwgatttgaaagtaggagaggatcccctgattggtggcctctttctggaacccaattatttctcctagctgattgccaagatggtgacttccacccagctacatgtccagtccttgggtctgctggacgtcctcctctccgtttgacgcagggctgttcagagtctttctctttttcttttttttttatttgaggtggaatttcgctcttgttgccccaggctggagtgcaatggcatgatctcaggtcactgtaacctccgcctcctgggttcaagcagttctcctgcctcagcctcccaagtagctgggattaccggtgtgcgccacccgcccagctaattttgtatttttagtggagatggggtttcaccatgttggtcagactagtctcaaactcctgaactcaagtaatccacctgcctcagcctcctaaagtgctgggattacaggcgtgagccaccacgcccggcccagagtctttctccccagaaggaaagaaaaagctgtcctttgctctccagaactcctcacgaccaactccttccccctatctatgtgcctccttccccaaagaaggtggatggcttagtctggggcttcagtgaacctccaaggaaggaattcaaggagaaacctgggctgagcaggcttcccccagacctgccctaaagctggcctggggctgcctatgaggcagctgcatccagggtgttgagaacactcagagctgggaaggcagagagatcagtggctaaagcctctcagaattaggtgtggtgctcagagctggggatccagtgacttggtgctgatggtggggacagaggggtaagggggctttgtggaccaccctccatggggatggctatgatcatataagactgtggacctaagggaaaaatctgaggccaaagtaatataagtagagagatttatttgggccatgtttgcagactgcaaccgggagcatagactcaagttgccctgattatatgatctgatgagcagcagttacaagtgggtttttaaaagaaaagaaggctgggtgcagtggctcacacctgtaatcccggcactttgggaggccgaggcaggcagatcacaaggtcaggagttcgagaccagcctggccaatatggtgaaaccctgtctctactaaaaatacaaaattagctgggcatggtggcgggcgcctgtagtttcagctacttgggaggctgaggcaggagaatcgcttaaacccgggaggagaaggttgcagtgagccgagattgtgccactgcactccaacctgggcgacagagcgagactctgtctctaaataaataaataaatgaaaagaagagacagttcctaagtgatttaccaagaatgtacattaaaatgatataagctattgattcattatactttgttctttgtatcacaaattttgttaacatgaaagtaatgggtaaagcagctagttaggagcaaaatgcctttaaacaattgtccctgggaaggaaggagcatgactgaagtctcatgtctctctgggcttgacacattttgcatacatcacatagctcagacagctgctgagctatttttctgttcttgtgaccaacagtttacacacacatggaaaactacaaaatgctgtttctatacaagcgccttgtattaagcctggaagtgttatgggtggtaaccataaatagttacaagaaatagactcttcccataatttccaaaacatgatttatgaatgatttggtaacgatatccctatgcattccactggggatcctccagtctaaatgtaacagtagaaaataactatgaacttggctgctggaatcagtgaatggtacacatctgttttagttaccctcctctgctttgaatgctgtacattgctgcagtgtactgtgaagcatgtaaaggtaataaaaagatgaatgagtttgttttcattgacagagctgtttttctagaaggagtctacaggggaagtccatagacacactgattcaaggcagaaagtttgcagtgccattaaagatgtcaatcaaagcaggaggaatctggtttgtggaaatgggagggggagacttcccaaagagcctggggttagaacctgatccctgaaaggttaggtctgcagtttgaagcctttgtacttccgtgaaatctcacttgtgcttcaatcgttgtgaaccctggtgccatcatagcttgctataatctcaaacttctgggctcaagcattcctcccatctcagcctcccaagtagctaggactacaggcaagtgccaccatacccagatcattttaaaattttttgtagagatggggttatgaagtattgcccaggttggtctcaaacccctgcctcaagccatcctcctgccttggcctcaagtgctgggattataggggtgagctgctgatcccggcctctattttacttcaatctacagatgaaactttggagccaggcagatctggattcaaatgaaccactttctagctgagtagtttttttacttaagttaaacttgactttttttttctttctttctttttttggtggagacaaggtctcgctctgtcacctaggctgagtgcagtggcacgatcacagctcactacagcctcgaactcttgagtgatcctcctatctcagcctccccagtagctgggactacaggcctgcgtcactacacccaactaatttttgtatttttttgtagagatggtgttttgccatgttgcccaggctggtcttgaactcctgagcttaagttacctgcctgcctcagccacctcccaaagtgctgggattacaggtgtgagccacacgcctggccttgacttttcttatgtataaatagtgcattgtgagggttaaatgaggtcccataagaaaatgcttaacacacagtttgatgccaaggacatgttcatcccattgcatgggtcagtgagcaacctgtcctagtggtgagctattttacaggaatgcttgtgtaatgatggcttggcccattcttacagtgaccccaaggcccacagtatagtaactgtgtctggggagtaggagggagaaggttccagcagggtaaactacctaagcaaaggtggggctgctggagatgggtggacaggcctgagcttatgctgaagatgggaataaagctggtcatgcattcaacaggccaacatgcaggctgtaatttcatcttctgggttggccttgccatgggactgtyctaataacgaagggtaggaacaattctgccagtgcctctccctttagaactaaacatgttgtatttctagcttacaaatcgtgctttataaacctcagtggcatgcatgtattcctccatttgggagttagttgacrggaaagcaaatcccagtcctaccagtcctaacttagtgtggctttaggcaagttactgaacctccgcagaccttagtttgtttgtaaaataggctgtttggacaagatgtgctctacctttgggagaagattctgtgattcctaaagaggctggagtttgagcctgatccctaaacccaataaggctgtgatttgaagtatgcagccttcatacgtgtgtgaaatttcacttggtctcttatgaaccctgagtatgcagcttcctaacctgacattctgtaattctgtagtcccctgagcaaaaagaagcatcaagttttgttttatacacacacacgcacacacacacttaaatatgtttttctttttcttttttttttttttgagacggagtctcgcactatcaccaggctggagtacagtggcgcgatctgggctcactgtaacctccgcctcctgggttcagcaattctcctgcctcagcctcccaagtagctgggattacagacacctgccaccacgcccagctaattttttgtatttttagtggagatggggtttcactatgttggccaggctggtctcaaactcctgacctcgtgatccgcctgccttggccttccaaaatgctgggattactggactcaaacaatcctacttcctcagcctcctgagtagctgggattacaagcacaaaccaccatgtgcacctggctacctcaaaggttttcttcctagaaaactaatatctagccttgtatgtattttagtaatcctrtcaagggacaagtgtcttgactcagcccccatccctgattcctaggcactcttctcctggggtctctgtccagctattccaaaagaaaacctgcagcatggatgcctcctgactccaagtatttcaggctactctgtcacctgggatggagtgcagtggcgtgatcacggctcactgtagccttgacctcccagtctcaggtgatgtgcccacctctgcctcccaaatagctgggattacaggtgtgtaccaccatgccttgctaaattttttgtattttgttttggtagagacagatttccactttgttgccccaggtggtctcaaactgctgggctcaagcgatcctcccaactcagcctcccaaagtgctgggattacaggtgtgacccaccgcactggcccttctatgtcttcttgagagagttttctaaacccaaattatcacttcttatgtattttctgtacatacttacaaacacaccagtggttccattcaagatgctgaaaatgggccaggcacagtggctcacacctataactcagcactttgggaggctgaggtgggaggatcgcttgagcccagaagtttgagaccagcctgggcaacatagggagaccccatctctacagataatactttttacaaattagttgggtgtggtggcatgtgcttgtggttccagcttcctgggggactgaggcaggaggattgcttgagcccaggaagtcgaggctgcagtgagccgtgatcatgccaccacactctagcctcagtgacagggtgagagcatgtctcaaataataataataataataacaaaacaagatgctgagaatggaagcttccaccaatatagagtatcttgttcaaaatctttactgggctgggtgcggtggctcatgcctgcaatcccagcactttgggaggctgaggcaggtggatcacctgaggtcaggagttcaagaccagcctggccaacatgacgaaaacccatctctactaaaaatacaaaattagctgggcatggtggcatgcacctgtaatcccagctactcgggaggctgaggcaggagaatctcttgaacccagtgggtggaggttgcagtgatccgagatagcaccacctcattccagcctgggcaaaagagcaaaactccgtctcaaaaaaataattttttttttttttactgtagtccttactagtctttgtagtcgtttgtagtttgttctttgtagttggtatttttcakaggtcacatactcctcagggtggttatgtcgagtggtagaaagatcatggggctttatgatataattacatacagtaaactgcacagatcttttttttttcttttttttattttgagacagagtttcactgttgttgcccaggctggagtgcaatggcgcaatcttggctcatcacaacctccgcctcccaggttcatgcgattctcctgcctcagcctcccaagtagctgggattaccsgcatgtgccaccacgcctgacttattttgtatttttagtagagatgggatttctccatgttggtcaagctggtctcaaactcccgacctcaggtgatttgcccgyctcggcctcccaaagtgctgggattacaggcgtgagccaccgtgcctggcctgtgtctggctttttttgctcagaagccaaggagtgcttttgggaggagcagctcattaaccttgacaaaaactcacaaaagtgagttttacgtattaaacagctcaatgtttcagagttctgtatgtattctagtattattcctttgtcagacatgtggcttacaaatgtttttccccactttgtagctttttttcatcctcttaaaagggtcttttgcagagcaaaattttttaatccttttttttttttaattttttgagaaaggcctcactctgtcaccctggctggagcacagtggtgcaaccacggctcagtgcagcctcaacctcctgggctcaagtgatcctcctgcctcagccttccaagtacgtaggactatgggtacacgccacaaagcccagctaatttaaaaaattttttcatagagatggatggcactgtgttgcctaggctggtctccaactcctgtgctcaagtgattttcccacctcagcctcccaaagtgctaagattactttacagacgtgagccactatgcccagcccatatagcaatttaaaaaaatttttttataaagtctaatttattaagtctagtttataaagtctagtttagtgagtttttttttttagatgggatctcattatgttgcccaggctggtctccaactcctcggttcaagcaattctcctgcctcagcctcccaagtagctaggattacaggtgcaygccactgcacccagcgctcagtgagtgtttttttttgttgtttgtttgtttttaatggatcttgcttttggtgtcaagcctaataactttttgcctagctctagatccagaagattttataatttttttttacacttaagtctgattcattttatttttgcttatatagaatgtgagacttagtcagagttcatttttgttgttgttgttgttgttattttttattttttttattttttatttttcgagacggagtctcgctctgttgcccaggctggagtgcagtggcgcgatctcggctcactgcaacctccgcctaccgggttcacgccattctcctgcctcagcctcccgagtagctgggactacaggcgcctgccaccacgcctggctaattttttgtatttttagtagagacggggtttcaccgtgttagctaagttggtctcgatctcctgaccttgtgatccacctgccttggcctcccaaagtgctgggattacaggcgtgagccaccacgcccggcctgttgttgttattattttcctgcgacagagtttcactcttgttgcccaggctggagtgcaatggtgcaatctcggatcactgcaacctctgccttccgatttcaagtaagttttcctgcctcagcctcccgagtagctgggattacaggcatgtgccaccacactcagctattttttgtatttttagtagagacagggtttcgccatgttggtcaggctgatcttgaactcctgacctcaggtgatccacctacctcggcctcccaaagtgctgggattacaggtgtgagccaccatgcccaggcagttcttttttttttttttttcctgaggctctttttatgcttttaatggccctcatgcattaaaatggccatcaattaagaaaatgaccatttagtagtgatctttttgggattttatttgtcacaacagcacctttgtcttgaacaatagttgcacattgtaactagtataaatatatcacctatttattcaggtacataaaaattataattttatttcaagataaaacagctattacaggttcagactcagcagttcagcattgtccttcctgcacaagcattggccatctctactcccatatcaacgaccactggaaggtcaaccactagcctagtgtctgtgcaaattaggcaaaggagccccccaagaggatgcagccccatggcatgtggcttggcgagtggcacatggactagaagaatgagatcacaaaactttcagtggtgtgcaagggagacgggaagggagagcctgcctttcgactgccatgagctaggagatatattggaccaatgagctataacacaagagtgaatatgttgaatgaggactgaggacttagctatgagtacagcatgtgaatttcatggacaagtsagggctcttgcttattgcataaatgttggtcttggctaggcacaatggcttacgcctgtaatccctacactttaggaggctggagtgggagggttgcttgaggccaggagtttgagaccagcctgggcaacacagcaagaccctgtctctactaaataaataaataaataaatcccagctgagcgtgtggctcctgcctgtggtcccagctactaggaggttgagacaggaggatcacttgagcctagaagtttcaggctgcagtgggccgtgatcacgccattgcactccagcctgggcaacagagtgagaccctgtctcaaaaaaaaaaaaagttggtcttgaccttgaccctttacataacaggcgctgtgggtctcctgcccatgctaggaagttgcttcatcttttggatattgtagacacccttagtaggagatcatcaagctccttgtattttccctcttaaaactttcatgtgaaaaaaaatttgaaacacaattacatggaaaaataacaaacacctgtgtgtctgacagggaataaaaatttaacctttcttgttttcagaaaaattataaatgaaagaaaacactacagatcaaattgaagtcccttttctgtccctcctgcagctgacccccaccagagagccaccatcataaatttaatatatgttgtgctgaagcacattttatacttttagcatgtctctgaatccataaatagtacagttgtcccccagtatctatggggggttggttccaggacctcccttgtataccaaaatccttggatgctcaagcctatgatataaaatggtgccatataacctatgtgcatcctcctatgtactttagataatctctagactacttataatacctaatacagtatctacacatcacttcatttgtgtggattcaacatagtacttagtaagcagcaagctcaagatctaagatattagttttacctgctgtatagcagtccatcctatgactgtatctctagcagtgaaattgctgtgctgaagagttgacattttcagcttttttacgtattgctctggtgagactgtgctaccgtgaccaccagcagcaaccaagttttgctgtttccccacatccttgcaaatatttagcattgctggactttaaagtgtctgctgctgggctcagtggcagtttgcttttcagaactttgtggaatttttttttccaaatatttttctttttcttttttttkgggagatggagtctcactctgtcacccaggctggagtacgacagcgctgtctaggctcactgcaacctccacctcccaggttcaagagatgctcctgcctcagcctcccgagtagctgggattataggcgtctgccaccacacctggctaatttttggatttttagtagacatggggtttcaccatattggccgggctggtctcaaactcctgatctcaggtgatccacctgtctccgactcccaaagtgctaagattacaggcctgagctaccatacctggccccagtatttttcaatctaaggttgattgaatccacagatgcagaaaccatggatacagagggctgactatatcttgtatcatttgatctgtttttaaagtttatatttgtttaaacatggaaagtacttagaatcatgttatgtgagtaataagtgctcttagtcttggatttttttgtgtatcaataaacaatacatattttatgccttttttttttcaagagacagggtcttgctgtctcccaggctgctggagtgcaatgacgccatcatggctcactgcagcctcaacctcctgggctcaagtgatcctcccagttcaacctcccgagcagctggaacgacaggtgcatgctaccacacagctttttttttttttttttttttttttttagagatggtcttgctatgttgcccaggctggtctcaaactcctgggcacaagcagtcttcccactttgacctcccaaagtgctgggatcacaggcatgagccaccgtgtccagcattattatgcttttataatttcagcaaaaatagtatcatagttcttttcttctttcatacagtagtatgtgtgttacagatctattcatctcagatggacataagttgagacctgtagatctaagttattggttttacctgctgtatagcagtccatgctattactatatctctagcagtgaaattgctgtgctgaagagttcttttttaggtattgycctggcgagactgtgctactgtgaccaccagcagcaaccaagttttgctattttcccacatccttgcaaatatttagcattgctggactttaaagtgtttgctgctgggctcagtggcacgaccctgtagtcctaactactttggaagctgaggtggaaggatcacttgaggccaggagtttgaggccagcctgggcaacatagacactattgctaaaaaaaagagtttgccgctctggtgggggtgaaagagtatctcgttgtggttttaatttatacttccctgattaccagtgagattgggcatcttttaaaatgtttattggtaatgtctcctgtgtctgttctgttcctattcattgcccatttattgtgtgagattatttgtccttattgatttgtgttttttaaaacacaggctaaatattaatcctttgtctcatatataaaatgaaatttataaatccaggctgttgcttgtcttttagccttgttgatgatgtatgyttctctgtggacctagggaccagcctcccatggggggtaaggagcagaggccagtccatggcttggaacaaaacaggatattgctttcaatttaattttgaaagcctcactggtggctagctagtatggcaccctccccaggaagcagggggtggcctcagcatggggactgttcctgcagtctctgggcccctcacaaatcaaggttctgagtccttcatcctccctccccagtggcttctgaagaggccttgcccagggcctgaggcatttccaccccccgacaggggcagggtccacctgtaaacctctggcccaggttccaagaacctctacccagcaggtaatatgtaacaggaggcaaaacaaacagcttctcctcttatgttctccatggcagacctgtttgcccaggcatttgcaatcctccctgccaactgtggctccctcagagcccagctctgcctgtggtctctacatgaccatgtcagaactgtgcaatcctttgtgcccagtgacctctagcccccgactttagttgccagccctgagtgtcacagaatgccacagctatttcacctgcattgccctgaaccagctggctcgtgttttctstccagttcctgctggtaggcaaggctgggctgggcagggctaatgctggggcagaaggctttccaggtgggtccgaccaggtggctgcacaggtagggtgcagagccactatgggttggtgccaggagaggtgagctggctcacaagagcagaacaatgagagaagaggcagcaaagaaaaagaatcagataccacaaggagatggaaaagtcagtgtgtgctcaaggactgccaagtgggaggcctagtgggggcagctgctgaaggggccatcccgggaggggctccccatggactggaggcactcagacggctccccgtcagcctgcagggcccccagggcaggatgtggatgggctgcagagtaaagagtagtactcttggaaaagggtccagatttgccacccatcagggtcagaaccttaagaaaatgaactacttgcttcttcatccttaaaaagaaatgatctgagagtaatgtgagaatcatatgagacacccaggctgtgcagtggcacgatgtcggctcactgcagccttgatctccccaggctcaggtgatcctcccacctcagcctccccagtagctgggaccacaggtatgcacgaccacacccagctaaatttttttggtgttttttgtagggatggggtttcaccatgttgcccaggctggtctcgaactcctgggctcaagggatccgcccaccttggcttcccaaagtggtgagattacaggcgtgagccaccatgcctggcctggcggtcctttttaagtcacagggctctgaaaagattcatgttgtattgtattggggtcttggaagccaggcagtcctgggtttgaatcccaggttggctgtttacatgctctgtggctttgggtgaggtgctgcatttcttggagcctcattccttcatctgtaaaatgggtatgtatcttggtcagggagtggttatgaagatcacagatcaggcatgcagagtctttgaagagagctggcatgaggacacagcaataaacatcagctcacatttttctgaaatctgctttatcacctacagtgtattagacattttccatgtcattaaatgttgtgtctttatttatttatttatttatttatttttatttatttattttgagacaggaccttactctgtctcccaggctggagtgcatggcacaatcatggcttacagcagcctcgcccttgtgggctcaagcaattgtcccaccttagcctcccaagtagctgggacacagacacacaccagcatgcctggctaattaaaaacattttttttggctgggcacggtggctcacacctgtaatcccagcactttgggaggcccagatgggtggatcacctgaggtcagaagttcaagaccagcctggccaacatggtgaaaccccatttctactaaaattacaaaaattagccaggcgtggtggtgcatgcctgtagtcccagctatttgggaggctaaggcaggagaatcgcttgaaccctggaggcagaggttgcagtgagctgagattgtaccactgcactccagcctgggtgacaagagtgaaactccatcccaaaaaaacaaaacaaaacaatttttttttttttttttttgtagagactgggtctgctatattgcccaggctgatctcaaactcctggaatcaagtgatcctcccgccttggcctccaaaagtgctgggattacagccatgagccactacgcctggccttttagtttagttttgttttagagacagggtctttctcggtcacccaggctggcatgcagtgacacattcatggctcactgcagccttgacctactaggctcaatcaaacatcctgccttagcctcccaagtagctgggaccacaggtgcacaccaccacacctggctaatttttaatttttttgtagagacggggtctcaatatgttgctcaggctggcctgagctcctgaattcaagcgattttcctgccttggcatcccaaagcgttgggattataggtcgtgagccattttgcctgaccatgtcttcattttttaatggcagtattgcattgtatatgctctctaatttagttatctaatctcttactcataggaataatttttttttcccagttctttgctaagtggcaattaatcatacctttaggcattttttaggttttatttcttttttttttttctgagacggagtctcactctgttcccagactggagtgcagtggcgcaatctcggctcactacaacctccgcctcctgggttcaactgattctcgtgcctcagcctcccgaatagctgggactatgggtgcacgccaccatgcccggctaatttttgtatttttagtacagacagggttttaccatgttggccaggatggtctcgatctcctgaccttgtgatccgtccacctcagcctcccaaagtgctgggattacaggcgtgagccaccgcgcccggccaggtttttgtttgtttgtttgtttgttgttgttgttttttagaatagatccctaaaagtagaattgccaggaggccaaacagcttctccccttagattctccatggcagacctgtttcaaaaggtatgcatattcagaatgttagtagatattaccaaatcagaaggaatccagatttacaggttttgaagctaacacagtttgggatgccctctttctaaacaagaataaaaagctcttaagtatcagattttgtgcaaactgaagatcgatttagaataagaaaagaatttgctaccaattgctgcgagcttgaagattctcttttgagctctctttaagcaatttgtcagaaatgctgacagataaatgcttcttgatttgcagccagctttccctctccaatttccaggcacgcccagcactaggatggtagggaggggccaggctggggggcatgctaaagtgtaagtttcttaggcttcctgcctctatacttaccatcttctaaaaatcttataccagtttacactctggtatatttctccacatccttgccaacattccatataatcaataactcctgtttttatgttgaaattcatagccattttattaatcttctctacttggggagttttttttaggccctattgaatgcagcgtgatcatctagtgctctagcttatcttaaaataacctctcccactgattgcataaagccagcaagaacatgaacctacttgggttacaaggattaactcttatttagctgcaactgctttctagtactgcttatgaatattctttgacaaaagtgcctatcatggaaatttgaaattaaatatagactcctctagaaagacagcaatctttggtttgggtagaggattactgatttgttctattttctcttcttgtaatgtttcatttattacagtatcagacaggttgaattattttatatctatatataatttttggaatagcagctttttggccccggtggtataataatctagataagtgatcaaaaggaattgagtttgaaatatcagccactggctgggcgcagtggctcacacctgtaatcccagcactttgggaggctgagatggayggatcacttgaggtcaggagtttgagactaacctggccaacatggcaaaaccctatctctactaaaaatacaaaaaaattagttgggcacggtggtgcatgcctgtagtcccagctactccggagggtgaggcaggagaatcatttgaaccagggaggtagaagttgcaatgagctgagatcgcaccactgcactccagcctggcgatagtgtgagactccggcccaaaaaaaaagaaaaagaaatatcagctgctaaaggatcagagactagatatcttccccagcccccgagtttctctctctgcaaacacacacacacacacacacacacacacacamttttgccaccatctgaaaataagttgcaggcatcataatatccatatttttcatctttgcttatctcgtggggaacaaatgcctcatgtttgtttttctttgatctgtgacatgggcacctcttcctatgcttactggccatttgtcttccatcttctgtgactttgtggcagatttggtcattattgtcttctgtgtgtaagtgtcacttggtctgttttggtggaaaaatgtttgcaattagataatgtggcttttttttgagagattggggctcactctgttgcccaggctggagtgctgtggcataatcatagctcactgcaaccttgaagtcctgggctcaagttatcctcctgcctcagcctcctgaatagttgagaccacaggtgcatgccactacccctggctaatttttaaattttttatagagacaggatctcactgcattgcccaggctggtcgtgaactcctggactcagggaatcctcctgcctcaccctcccaaagtgttgggattataggcatgagctaccgtgcctgacttacatgaggctgtcaatcaacctttttagcagcatcttggaccagttgcttaactttttcatctcagtgttctccatctttaaaacaggaataaaagtcctcatctcccacaaattgctgggacaatttgcctcgaaaacctgtatgattgcattacagaggagatactcagtgttccttttctcttctgttcagataccctgcagatttacccatctctgccttcctctctgagagtgcttatcttttcataaagcagaatcattacattcccgacgtgtcatcaaaagtgtctacaggctgggcatggtggctcacgtctgtaatcccaacactttgggaggccaaggcaggaagaatgcttgagctcaggaggtcaagactagcctgggcaacatagggagacactctgactctacaaaaaaaattttttttaattatctaggtctgctggtacattcctgtgttcccagctactcaggaggctgggataggaggatcacttgaaattgggaggtcaagtctgcagtgagctgtgatcatgccactgcactccagcctaggcttcagagcaagaccccatcctatctttaaaaaaaaaaaaaaaattgtaaagctgccctctggatcttgctggagccttgcattcagtaagccatattctaaatgaacaactatgcatcatcagctgctctgtgctcctgaacctgtagaacatgcatccacatctgaaacaggttggcagggctaacagtcacattgtaccatgactgtccagaaaacacagcctcaggaaggaaaagcctatgacattcaacattgggactgtttattttcttgagtaatttctaagacagagatcatgaacagatgtgttttcttggcttgcccagctttatttattaatgtatatattttgcacagatgtgctatgtgctgcttttatttttctgacagaatgttaaataggtactgcaatgttgctaaatttagtttattaattatgactacattggcagtagcttaagccctagaaggtttttttttttaaaacttcgtgttgaaatatatgacagattcagaaaagtacacttttttttggaggcaatcttggctcactgcaatctccgcctcccagattcaagcgattctcctgcctcagcctcctgagtagcggggattacaggcacatgccaccatgcctggttaatttttgtatttttagtagagacggggtttcaccatgttggtcaggctgatttcgaactcctgacctcaactgacccacccacctcggcatcccaaagccaccacacccagccagaaaagtacacatattttaaggcccacttgatgtacttttgataaagtgaacacacccatgtaaccagcactcaaatcaagacacagaacatgaccagaaaccaggagttccctcgtgacctctttaagtcactgaccctcaccaactgaccattctcctgacttctaacagcatagattagttttgcctattttgtacgtataaatggaattagacagtayaccttttaaaatctggcttctttcattgaacattgttttatgagattcagatygctgggcataatcatagttcctttgctctcattattgtataattacaaataagtcaccacttatttatctgttccatcgttgatggacatttgggtattttaaatattggaaatgatacaaatatcctagtacctgtcttttggtgagcacatgtttgatttctattggatatatacctaggagtagattatgcacattattttttaagtgtacattcaatggcttatagtatattcatagatatgtgtaaccatcactatagtcaattttagaacattttcatcacctcacagagttaccctatgtccttgtagctattatctctctgtcttcccatccctcccagcactaagcaaccacttaatctgttttctgtctctatagaattacctattctggacatatatatggaatcatagtgtcttgtatgattaaaataaggatggccaggtgtggtggctcactcttgtaatcccagcactttgggaggttgagacaggtagatcacttgagctcaggagttcaagaacagcctgggcaacatggcgaaacccagtctctaccaaaaatacaaaaattaaccggatgtggtggtgcgcgcttagagtcccagctactcggggggtgctgggacaggaggatctcttgagccccagaggcagaggttgtagtgagccgagatcgcgccactgcactccagcctgggccacagagtgagactctgtctcaaaataataataataataataataatgagatgatcaaagtatgatttcacgagtcacacagtttattgccatacaaagagtttttttctttttttgttcacagtgcttaaagcggggagaataagaaaacaaatctcatagggaatacactcaatagaggaggtcccttagccacatagtgagtgagttccagtctgttagaatccaattattaaagtctaattgctcacttaggatgaaagcaagcctctgtggaaagtagtctgactgacgcttgaggcgtacctttatagagagattctcagctagatggcttgaccatcctagagggtataccggagttggtgaagctttggaaattagctcaaaggctgatagggtgtggccttagctcagcctgagctttcactcttcagagaagcgctcagagtgtagccctgccacagcccaaggtctcaaagtgtctgtcaaactcttgggtttatatgtacagtctggcgttgcttaacaacgggaacacattctgagaaatacatcagacaattttgtcattgtgcaaacatcatcaagtgcacttacacaaatctagatggtagagcctattacacacctagagcctgtgctcccaggctgcaaagctgtacagcatgttactgtcctaaagactgtaggcaattgtaacacaagggtaagtagtcgtgtatgtgaacatatctaaacgtagaaaaggtatagtcaaaatacaatattacartataatcttatgggaccactgtcatatatgccatccatcataagccaaaatgtcattttgcagtgcatgactgtattttagagtccagtagctgaggtcagtagttcacaaatggggtctgataaggtgtgattgtgtcacattcacaaggggaggggagtacactccatgttcttgtcacagcaaaacatgtcactcccatagcaaatgtcaacataaataacaaacagaaaaaaagtcttcaagtataacgagtttaattgggaatgagcattgcaatgaggaatatgtatgccacagtaaactatgggcatattcacagaggtaaagaagacaaggatttttaaaggtaaaatgagggttacatatgttgtcttgaaacaattatcctcggctacaaggatcaaaaacaagggtggcatcagtccagggctggacaggcagttgctgggcaaatgtcctcacagaagcattttgtgtgtgtgtgtaagattgaggtggcctttgtgcaaggttgtggttttggcaaagtctcttgtgatatcttttgttatcaggcagtcgtgcaccagaaccctccctgcatgttcttacctggctccattttgtcagggtttgacacaagtgactccattttgattctaacaactttttcacaaactatgtatgtatttggaattatttcaaagttgtatgacatatacaatatgtagtctttttttttttttttttttttttggagatggagtctcgctctgtcacccaggctggagtgcagtggtgcaatttgggcctgctgcaacttctgcctcctgggttcaagcaattctcctgcttcagcctcccgagtagccgggactacaggcgcccaccacaatgcccagctaatttttgtgtttttggtagagacagggtttcatcatgttgcccagggtgctctcgaactcctgagctcaggcaatctgcctccctcggcctcccaaagtgctaggattacaggcatgagccaccacgcccggcccaatatatagtcttttgttactggcttctttcacttataaatgttttcaaggttccaccatgttgtaatatgtatcagtacttcatttccttttttttttttctttgagactgagtctcgctttgtcacccaggctggagtgcagtggcgcgatctcggctcactgcaagctctgcctccagggttcttgccattctcctgcctcagcctcccaagtaactgggactacaggcgcccgccaccacgcccggctaattttttttgtatttttttttttttagtagaaacgggatttcactgtgttagccaggatggtctccatctcctgacctcatgatccacccgcctcggcctcccaaagtgctcggattacaggcgtgagccaccactcctggctacttcatttcctttttaaaaattgctttattgtagtaaaatacacataacatacaatttaccatcttaactattgaagtttgcagtttagtggtattaagtacagtacactcacacttttgtgcaagcatcagcaccacccacctccagaactttttcatctttcccaactgaaattctgtacccattaaacgataagttcccattgccccctcctcagccccctctactgctagacagcttttaccttcagtttcttctttcacttaataaacgagagggtccgttgctgactaatgggattgcttctctaagtggaggccttttctaagtggaggccttcttgcatatatacgattgagtttatcctaaaaacgggtaacagaaaatgtggttgtagaaagacaagaggtggagacacaaactggccaagggttttcatactgggtgtcctatccacaggccacagcagccccaccgcagatctgcccgattctttggcatcaagaagttgatccagctcacgcctgtaatcccagcacattgggaggccgaggcaggtggatcacttgaggtcaagagtttgagaccagcctggccaacatggtgaaaccccatctctaccaaaaaatacaaaaattagccaggtgtggtggcacacacttgtaatcccagctactcaggaggctgaggtgggagagtcgcttgaacccaggaggcagaggctgcagtgagccaagatcatgccactgcactccagcctgggagatagagtgatactttgtctcaaaaaaaaaaaaaaagtgatcctgcgagccatttccattttgtggatttgctggcaggtttcagaactctcctgctgtcactgtcagcatagcttctcatagtactaccaatgcttaatgtccttaatgagttcatccacggtgaggactctctttagggtcctgtatgtgccttccacattcccttcctgtgccatcatactcctggcaatgaacttcaggttttaaatccatgagcttggatctaagtctccactctgccaaacctgatgttccatacccatttgayctctgtaatccaaataatagattccattgtagggatggatatgccacattttgtttatccgttcatctgttgctggacatttggtttgtttccgccttttgggtattgtgaatagtgctgctgtaaacattcatgtacgggtttttgtttgttttgtttgagacartttcactctgtcacccaggcctgttgtgtagtggtgtaatggtagctcgctgtagcctcgacctctcaggctcaagtgatccttcagagtagctaggcctccggagtagctgggactacaggtgtgcaccaccatgcccagctaacttttaaattttttttgtagagatggaatctcactatgttgcccagactagtctcaaactcctgggctcaagcgatcctcccaccttrgctcagagagtactgggcttacaggcatgagccactgtgcctggcccaagtttttgtttgaacacatgttttcagttcttttgggcatatattataactaggagtggaattgctgggttatatgctaattctatatttaactttttgaagagccaccacactgttttccaagcagctgaatcattttacattcccactagcaatatataaggattacagtgtcctcacatgcttgccaacacttgttattttgtttttttattttttatttttttgagacagagttttgctcttgtcayccaggctggagtgcaatggcacaatgttggctcattgcaaactccacctttcaggttcaagcgattctcctgcctcagcctcccaagtagctgggattacaggcacccataaccacacccggctaatttttgtatttttagtagagacaaggtttcatcatattggccaggctgacctcgaactcctgacctctggtgatctgttcgccttggcctcccaaagtgctgggattataggcgtgagccaccgcgcccagcccttgattttattttatttttttgccttccaagtgagcatgatgtggtacctcattgtggttttaatttgcgtttcatctgcttgttagccattcatagattaccttcagcaagatgtctactattttttaattgagtcattatgtgcattatttttaattcattcatttggtcattcatctgagcacctcttatgttcctggcactcagacacttgggataaagcagtgaacacattagttgccaacactggaaagtcaagagaattcttaaaaaataaaatttcttgctcctgacttctctactcagatctgggcctgagttctcaggagccagccctctgctggcacctttaaggtggggctgtgctttgtttcttcaaggctcctatctggtctcagtcccacctgggccctgagagccttgggttttacaacacccatgctaagtagctgatgcctttccaagtagttactttagttctgagttgagaacaactggcactgctgtttttcctctaactccttaagcttcccatgtcgcattgaaaaaaaaaattcctaaaaccaaatccctttaagaatagaagttggggcaccgtggctcatacctgtagtcccagctacttgggaggctaagatgggaagatctcttaagcctgagagcttgaggcttcagtgagcagtaattgtgccactgcactacagcctgggtgacatagtgagtctcaaaacaaaacgaaaaaatagaaaaagaagtgtcgggtcgaggggtggggccgggggagggagagcatcagggtaaatagctaatgcatgcagggcttaatacctaggtgacaggttgataggtgcagcaaaccaccatggcaaacgtttacctgtgtaacaaacctgcacgttctacacgtgtatcccagaacttaaaataaagttaaaaaaaagaaagaaagaaagaaaaagaagtggccaccctttatgccccaggcatttgtggtgtgggcaaggaaggagaattggtttgtttatgcttcctctttcgaaatgatgggtgggtcctatgtttatgagcacattgcattgatatgagtttgtagaactcttttaattccttggaagagccacctgtttccaactcaaccctgccctaccctggtcccagtttcttgggatcagttagtagaaattgtggaataataaaattgaggttatattatctctgatgatcagataggagataaattccaaaccagaaggaacaggaatcacctatgccctctcctttctcccagatctgagggtggggcatgggcaggcatggctgtaacgttgaggcagttgcaccgggtcctctgctcctggctcgggtgttcatccgccacgtgatccacttgatctctttgtacttcagcttctttacctgtggaatgggagttcatgatactcacctgcatttttttaaacatttttttaaaatttgggacggagtttcactctgtgggccaggctggagtgcagtgacacaatctcggctcactgcaacctctacctcttggattcaagcttctcctgccttggcttcctgagtagctgggattacaggcacacaccaccacacccagctaattttttgtatttttagtagagacggggttgcaccatgttggccaggctggtctcaaactcctgacctcagatgatccacccacctcagcctcccaaaatgttggggttacaggcgtgagccaccgcgctcggcctcacctgcatttttctaggattatattagtgtgtctcaaagaaacccaaactgagagtgactgaaagaagatgggggcaagggaatggttgtgtgtcttgactattatcaatatcaatatcctggctataatattgtactatagttttgcaagatgttaacattgggaaaatttgaatattgatgctgaagaatgcatgagctatttctgtattgtttcttttttgtagttttttgtggttgttgttttggrtttgtgtgtgtgtgtgtgtgctgttgttgttgttgttgttgttgtttctgagacaggctcttgctctgttgcccaggctggagtgcagtgggtgtaatcaaccttgaactactaggctcaagagatcttcctgcctcagcgtcccaagtagctaggagtacaggtgcatgctactatgcctagctaatttaaaaaaaaaaaaattgccagcctgggcaacatggcaaaaccccatctctacaaaacatacaaaaaaatagccaaccatggggtcatacacttgtagtcccagctacacaggaggctgaggtgggagaatcacatgagcccgggaggtccaggctgcagtcagtgagccatgactacaccactgcactcaagcctgagcgacagagtaagaccgtcccaaatttttttttttttttttttttttttagagacagggtcttgctctgtcacccaggctggtctcaaactcctgggcttgagcaattcccctgccttggccttccaaagtgctgggattacaggcatgagccaccgtacctggcctgaatatcatttcttacatctgcatatcaatctacaaatatcccaaaataaataatttaattttcaaaagcaaaaaaaagaaaaaagaaaggagatgggagtttctttatctgggagacagccagtctgtgactggtgtggtagctcctgctgtccaggcgtcaggctcctctcttgttgctctgtggtgccccaaatcactatgtggtccaaaatgctaccattcttttcccgtcacaagcagcattccagcctgaggaagaaaaaaaagagaagatgtcccttcctctgaaagtttcttctctgaagttgcacacactatctctctttaaaccccactggccaggacctcaccatctggccagatcggctgccggggaagcttggaaacctggtctttattccacacaacgtggccagctagatgtctgagggtgtgtcatgagagaagaaggacctattggggtttctgtcacaccacctgtcagagccgctgtgaagacacaggagaaaacacatatgccaattgaactggatttttttttttcccccataaatcagcctgccgatttcccaattagaatttccaggagaccactgtttggtctgaaaaccatggtgaataatggaaaaccaagttccaaactaaatgggactcctggtcattgtgagaataggaggatgcttgttgtgaggctgaacacctgccgtccggctggagtgtgcagtggcaccatcttggctcactgcaacctccgcctcccggattcaagagattttcctgcctcagcctcccgggtagctgggactacaggcgtgcaccaccacgcctgttttatttttgtatttttagtagagatggggtttcaccatgttggcctggctggtctcaaactcctgacctcaggtgatccacccacctcggcctcccaaagtgctgggattacaggtgtgattcatcattcctggccagttcccagactttataggtggggaaggtgagctttagaaaggagaaatcctgtgtcttaatttgaattctcctgagaacaaggacttgggtgcaggtagtttattttggagagtgatcctaggaagtggggataggaagtagagagagyaaacagggagtggggaagctgatgaggggatgttattaacatcatcaccctaggcaacaagagcttcattcacctggacctctgagaaggtacagatacctcccagaaaaggggagacttggagctccagccccatggggttgactgctgtccctggaggcatgagctcctcttccaggctgggctggcctgcagaaccagggactcccacattgaggaagttcctgagcaggcagcagactcccaaggagccaccccagcagctgtagctaaaaccaagggtgggcggaggagctgtgacataagacacccatcacccacccagccagcagcacacctgcattgagacctcgggtcctcgagtccctggcctggtgcattctccccgtgtcccccgagcttcagagcatcagcagtgttcctccttcactgtgacgcttgtcctcacttcccaggtgaggagtctaagaaaacagcctttccatcagcccctgtcgtgacagaccctccagtgggatggtagtggctgcctcacccatttacagggcaacccagttttgctccttctgccttgaaatttgttcctcccagaaactgtccctcacaaggcatgaacaatcaatagaagatatacgtggtcttcccagcactacagctgcagaatgagctgtggagtgccccgtccggagtcctgaacagcttcaaacttttcccctttagaaatgcctgacacgccccaaccccagtaatcatcgtgcatttaacttaggggttgcctcacccttgggagatccaaacccccaggctgacttcctgtccttcatggaggagaaggctcttgtctgcagtgtactcctcagtttctactcagggccagtgacctggagccttggcacagaaaccctgaagagagaagctgaggtaaatccactgctttggccaagcagacaggtgacctgcaagagatgggaacagcctcatccttaacactgcaccctctgataaaaaggtacctggtggccgggcgcggtggctcacacctgtaatcctagcactttgggaggccgaggcgggcggatcacctgaggtcgggagtttgagaccagcctgaccaacatggagaaactctgtctctactaaacatgcaaaattagccgggcgtggtggcgcatgcctgtaatcccaggtactcgggaggctgaggcaggagaatcgtttgaacccaggaggcggaggttgtggtgagccgagatcacgccattgcactccagcctgacaacgagagcgaaactctgtcttaaaaaaataatgataaaaataaaataaaataaaaaaggtgcctggtggccaggtgcggtggctcacacctgtaatcccaggactttgggatgccaaggtgggagaatcacttgagcccaggagttcgagaccagttctggcaacatagtaagactccatctctaccaaaaaataaaaataaaaattagctgggtgtggtggcacacacctgtagtcccagctacttgggaggctgagatgggaggattgcttgagtttgggaggtcgaggcttcagtgagccatggtggcaccactgcactctagcccagttgacagagtgagatcctttctcaaagacaaacagacaaacaataaaaaaaaaaatgaaaaaaagacctctgggaagtccaggtgtcacaccctattcctaggactgcgtgtcctcactggcctgctctaggtgacagtttctgagctcttactcagacctaggtgggaatgtgaacagagcaaattctgttcccataggagaagatgtgctctggcttccagaccttccaggccatcattggatatgggctaggcagtccctggtggaatccaggtagaagctcccagggccccctaggctgaggaccacaccattggtggccatctctggccaggagggtgtggaggtttggagggacatgcagcatcttccttcatcactartgggatgggaagaggaccagttttccactctagaccttggcagatctcagtagaccctgagggcccacagatttcatagacatatggaattgaatgaaattacaagggggagaagcaggaggagctgaggttggtagttgagatgtgaggagtgtggggaaagaaaccccacttctgtcccatgtacccctaggagagagtaggttatcttcttttggttctcttctttaccgaatagccttaatccgagagttgaaatgatttgtttacatacatttctcttcctaccacactatggctacttagagggctgggagcagtgtcttatccatccctgtatccctagtacctggcacagggctggcacatagtaggtgctcactaaagcttgcttgaatagatgagtcaaaggcggttggggtggcttagatggccaagagagtggttgtcaaagtgtgattcatagaatcctcacccagtcccacatcagaatcacatgggattctgttaaaaattcagattctcccggtccactccccagaagctctgcaatgagtaggcattgcaggggcccaggaatttgcattctttgtgagatcctgagatgattccgaagcagctctccatggaccacatcttgaaaaactgtcacttggaggagggagtgacactggttgagaaggttccttctgatgtccctggagggacaagggagggatcagcccataaacacagatcctggttccaacatccatccatccctcttcacttcataaatgatgtgggtccacttgggcccatgggtggagaaaaccccaaccccagaacctggagtttgggggctctcctcattcttccaggcccaatgtcctctgctctggaccctttggtttcagctgggttcaagttccagtcaccctcccgttctcacagcactccctttcattttccatgccccagccacagagacaagctctcctctgctggaaaagccctcctctcccttctctgatgattaatacttcctcacccttcagctgtcagcttaggcataaatttcttaagggagttttccttggagccccaggtgatcccagattccgtcttacaggtgctcctaggaccayggccccttccttatctcagctttctaaacatacattcatcattaccaaggttgactgcactcctgtctttcccaccagacccttatctctgcaaggacagggactgtatttggctttgttcattttttaccaytgggccctctctgtggtgggtgtttcctaaatatttgttggaggaataaatgttggctaagtactccgtagggctgaggaggccatagtatgggtggccccagggcccaggtctaagagaggctgccttaacccagctttgaggggacagacaatgggcctcagatgggctgggattccccccacagtctgcctcatggctcccatttcctgattttctaggctgttcccacccacgaagagctaatatgtctaatttccccagagacagggagcttcttagaagaaggactgtggcttgttctatctctagtcctagcatagtacttggcacatacgggtgctcactgaatgtgtgtcgaaagcatggtcgataaatgccatgaatggatggtaaaatgcctgtcgactacagagcacttcaccattcgcaaagcacctttgcaggcctgttcacgcttgaacgtcatggccctgctatggaataggcaaggcagtctcttcatccccttcgagccaaagagtaaacagataacttgccaggtcccactgggttttattggtttgttgtttgagacagggcctctctctgtcacccaggctcaagtgcagtggtgcaaccatgactcactgcaacctctgcctcccaggctcgagtgatcctcccccttcaacctccggagtagctgggactacaggcatgcgccaccatacctggttaattgtttaaaatgtttcatagagacagggtttccctatattgcccaggctgatctcgaactcctgggctcaagcgatcctcctgctgcagcctcccaaagtgctggcaagactttacaggtgtgagccaccatgcctggctcaggtgccacagttaataaaaggtggggaaagttaagtggagcagtaatggaagtgcaggttctcctccagcttgacgtgcccttacttaggggttgtctcttacctggcagggctgggaggagatgggtagttcctgaaaggccgatggagaaaactggggagtaggttactactcccgtgactgcccaggcctctacccagacctgtttccacctgtgcactgaratggataggtagccacatgtgagaggtgaagagtcccggccccagactagaacccgagccaggtcccgagctggctgcttcctccactcaacatccccagctcagtactctcaggctcttggtgccccttgcttatctgacatctggcccctttgccttaactggctgctttcagccagcttcttaattccctggagacagaaactgcctgcctgccttgtgacatcatctgagagtgggagctggagcccaggtgccatttggcatataggggctttcttcttcatctgcaggtgcccaggatctttagcacctggcactgaacacctacaggcctgtggaataacaggggccgcccagctgcctctcttagggcctccatctgccctctcctttatccctttcctattctgtctttggctttcaggccctcaggagaaaaactggcccaccaaggagtctaaaatcctaagaccttggattcaagcccagggtccaggcacgcttccctggttcctcaggaaggaccccagtgacctgtttattctccaggaggcaggggctaggggtgaaggcatggtcctgctttgtaagatctgtctgtctgcacaggcaggctctcccaggcttcactatggcatctcacctttcccgggaaggcgaaggagggccctttgctccagcttggtgtaaccttgtccctgtcctgctgccttgggattaggcttgaggttgggaaaagggtctgggggattttaggcttacaagaagatctggaggaaacctagtggtctctaacacattgtcagcagcctaccccctggcttggctgggtgtgccatgcccttggttccagggagactgatctgggacagtcaaacccatagctcctctccctacagttccagagaggtggatcgcatggtctccacgcccatcggaggcctcagctacgttcaggggtgcaccaaaaagcatcttaacagcaagactgtgggccagtgcctggagaccacagcacagagggtcccagaacgagaggccttggtcgtcctccatgaagacgtcaggttgacctttgcccaactcaaggaggaggtgggtcctgacctggaaacctcaaagtgggcaagtactagctcccaagctgccctagctgggcagaaccaggagcgtgggcacctggctatggggcaatgtgctagggctgccagagaacccygwgggatggcaggagaaggagacaggactgacgcacaaggggtccaatgcctcctgtatcagcagctcctggggcacctgttaactatgcaggccccagggcagacccactgaggctgggaatctgcctgtccctttgtccccagtgactgtgatgagaactccgggctaagggctgagggtgggagtcttgrgccccttcctgcttgccccctttcaccccttgyrccccatcttttacactaggtggacaaagctgcttctggcctcctgagcattggcctctgcaaaggtgaccggctgggcatgtggggacctaactcctatgcatgggtgctcatgcagttggccaccgcccaggcgggcatcattctggwgaggaggggcttgcttggcacagcttggtgtgcatgggggaacaycactgaaggggagcccctcaggccctcagccccaggatcaaaccagtgccttgttggtttcaaaccaggtagtgctttctcctgaggcccaccaaggaggtctctgggagttagggggctgtagagtgctgcctctatgcctcctgggggcggaggggcagcaggagggacagggtctgcccagaatactgatatgccctcgccgcttccaccaggtgtctgtgaacccagcctaccaggctatggaactggagtaygtcctcaagaaggtacagctcatttgtcggggaggggcccggctggggcctggcacagggggctgcacagactctgcttgtcagagtctgacggtgtgagctagggcatgcataggcgggtgatacgcagagtgtccttccttaggccatgtgtgattggaaggtggccccaactccaaggagagcgtggttggtcagacacaaacctggcgtgagtgtgcagggacgggggcatgtgtgtgtcagggcagaggtgtgtgtgtgtgtgtgtgtgtgykcrtgtgtccatcctcatatgtgatgcatatgtgtctcagggtrtggtgtgtgtgtctcggggctggtacatgtgtgcatttgtcttggagtgtggtgcctgtgagtgtgctggaggtgtgtgtgtcagaagcgggtgcatctgtatgagagcagctgattagtgaggactcccccagagctctagtctggggctccccgctgactggaggtgggggactccccttccacaggtgggctgcaaggcccttgtgttccccaagcaattcaagacccagcaatactacaacgtcctgaagcagatctgtccagaagtggagaatgcccagccaggggccttgaagagtcagaggtgggtgtgtcccaggttagtgggtggtgcatcattcagcatccctgattccttcacttcctacccaccctgccccctccctcagcccctgtctctcacmatcgtccccaaccccaggctcccagatctgaccacagtcatctcggtggatgcccctttgccggggaccctgctcctggatgaagtggtggcggctggcagcacacggcagcatctggaccagctccaatacaaccagcagttcctgtcctgccatgaccccatcaacatccagttcacctcggtagggcagaggtctccaggccccaagcccagatggacacatgccccctgtccctgtgacacttccgcggggatggggagacagcagaggagagcatgccttctttactgagactggccttcagctgtcctctctgccctggaaaatatcagcacctggtgtccttgtcacatttcctcccctagccccccgccctctccactccagccctcttgttcccggtgcagtggcagattcactgaaccaacacaggttggaactgctacaggctgcccctcatttagctgatgaggaatcagagacgcagaagagagaatttgcccaagccagcttgtgggtggcagagttctctgggccatgtaagtggcatgagaacggagaccttatcttctgcattgctggaccctgacacctggtatcgtggtagaccttttgcaaatatactgaacagatggatctggggcaacaatccctgtctcctgattcccggtcccgtgctcttcaaggcagtggcccagggtgggaaggagatgagaaggaggccaagccatgccctgtttgccttgtcaggggacaacaggcagccccaagggggccaccctctcccactacaacattgtcaacaactccaacattttaggagagcgcctgaaactgcatgagaaggtgaggcggcactaggcccagggcaaggctgcaggaggggtggctcasgcaggggtggggggctggctgggctccccttgccagctagagaggaactggcgtctggctccaagacagacccagcctcctgtctccatsaccagacaccagagcagttgcggatgatcctgcccaaccccctgtaccattgcctgggttccrtggcaggcacaatgatgtgtctgatgtacggtgccaccctcatcctggcctctcccatcttcaatggcaagaaggcactggaggccatcagcagagagaggtgggcactggtggacaggctacttgtgggctgataaaaccctcttsttcctcactcctgggccctgacacctttccaagctgcctcctccctccagccaggagactgaggatggggacagtggaggacccccaggagaggaccagttcctgcctcaggagcttctcctgcctattccctttgctgcagtttcatggcggggtgggtgagaacagggagttcccttccacttccaagcctaatttcgagacctcctcctatacagaggcaccttcctgtatggtacccccacgatgttcgtggacattctgaaccagccagacttctccagttatgacatctcgaccatgtgtggaggtggggtggggccaagggcagccaggcttggggagggggctgcttcccccacaggaatggcccgggtgagttagctatgctcccagtcttttatatagggggcaagaaggacgctgtaaaaatgtgggtgggagggagggagatccccagtgtccctggacaccagcccaggsccagctgccaggtgtaggaaaggctcggggtcagaggagaaaagggartgttcctcccctgaatgagctgtaggtgaaaggactccactgggcctggagaattggggagctgtgtcagccctctctctgattcaggtgtcattgctgggtcccctgcacctccagagttgatccgagccatcatcaacaagataaatatgaaggacctggtggtgagtggtgactgcggcccgggctgtgggcaggccaggcctgggatgacarcagatggacagacatggggatgagtccaggccagatgttyaaaggagaccctctcagccagccctccttccagaaagcagatgtgagaaaagatagtctgacctcatcagcacctggtgggtgaaggagataggtggcaggggagtaaatataatacatacatacatttatatttatagaaatctcaggaagaaattgcagcatgggaagatggacagcaaagcaccgatgwcctgmtagaacgtcctggcaggtgggggctggcagagttggggcatgggctttaaaaccctttctggaagcaaggggtggggcaaggatctgatgattgtttccacgtggcagggaaagaggaacagaggaaggatgatcctgggagggtggccatcctgatgaccaacctgttgtggttctgattgacttggkgggggggtctcagcaacagcttctccaagaggagctggagggtggggaaggcatgaaggctggggagaggctcagccttccttctccccaggacactgctgggtggagctgggttggtagtggagtgcccgaggccccctgccaggacgtgtctaggtgtaggcagctctgtgcatcagcagaggctgtggggagaaggtatgggtggaggtgagaaggtcagtagtctctccggtggaaggcagaggccagtcaccaggactggctgggtcagaacctgcaaagaggcaaagatcgatgtcagtactccaacaacacagatgatgcttgaagaaaatggtggaagtcctgggcaggaccttttcctcccttcaacaggggacccagtcgtcccctsctctctctgtaaaaatggagggtctgcctgaccctccagggscagggggtatcctggaagataccagctcacttgctggaatcaccaaagagggacataggggacctgtttacctggcccccacctgtttaatggcggccagctttcttggacctcttgrtggggaacttgcagctgcggaaggcgtccgtgtcacggatgtgctggcccttgaacttggcaggtgaggcacaggtggcatctgggmgggaggccttggcttccagccacctggagagacagaaacttgctggggctggggaagaaggtgggagtgctggggggaagggyagtgaactayggggccaggattgacttggccacaggatagtctgaagctgtcatcttcattttacaaatggggaaaytgaggctcccagggtcccatgcttattaggtagcagatctaggatgcatgtccaacatgtcttagtgcagggctaatgtgcctctatcacatgagggtgggctctgggagtgacatggaagtgttcttaccgcyraaggccccggagctggcaggtacacttccaggggttattggtaagggcgagggtctccaggctgtcgaaggggaagttggarggtagctggttcargcggttgttctccaaatggacgtgtttcagcgtggttacacccaggaaggcaccatctgagaactggggagcaaggtgggagcaaggtgggagcaaggtggtcatgagtgaatgagtaagcacccgagtgccagaggggcaggatccttccctgaacctgagccatagcactttgaggagtttcccagttttcaaagcagtatgaccaagtgatctcagatamtccaatctacacaaccccctttgagacagatggtgttattttcttttttttttttttttcctttttttttttttgagatggagtctcactgtgttgcccaggctggagcacagtggcacgatctcagctcactgcaagctccgcctcccgggttcacgccattctccggcctcagcctcctgagtagctgggactacaagtgcccgccaccatgcccggctaattttyttgtatttttttagtagagacgcagtttcaccatgttagccaggatggtctcgatctcctgacctcgtgatctacccgcctcagcctcccaaagtgctgggattacaggcgtgagccaccacgcccagccaggtggtgttattttcaatatgcaaatggggaaacggaaaaagcgcagtcctttgccctgggtcacagcagtgggtaaacagtagccacaggaccacacccagctcctcttcccctggcaccacaatccctgcacaaacactgggactgtggggctgccagagtttggccccagcaatccaaactggtacacggtgaacttggtctgtgcttggtggagtgggcagtgggcccaggctccccacagtcccagggtcccaggacttccctcagctctgtcctcactgctcccccactgccagccagacgctatttgtgaagccaccttggtggagcctttggccaggttggacggctccagaggaaatgttctattggtgcccacacctttgcccaggcgccacaattcctgtctggcctcccctgccccaaaccagcccctaattcgctgctctgctgcccactgaaagaccactctggcactggtgggccacaggggactccaacttcagctggggagaggcagggctgaagaagggcaggcttgagcaggctccttccacccagacaaaggttggctgctgcccaagtgagattctgcccacatctccacacccgcaccctttcctgtggcccacattgaggtatgaaggtctccagtaaccagactctcctctaccttgttggttccccacccaaacctcctggctgaagcccctgtaccagggtgatttttccagtcccagagaagggattctgctctgatccaaggtagccccacctggccagacactgggcaccccaggggagaaaggaatgagtgaggatgcagacaggagatgggtctagtgacggaggagggcaaagggcagttagcagtctggagacagtgagtcacgccagtcttctctgtggagagacacctggggtcttgggccaaggattgacaatagtggtcttgcctttgccccttcacggagcccatgggcacgatgcttgcatcctgggggagcccttggtcccacgcctactgagctgcaatggacttgagaatgcagtgaattgtgtctgtgtggattgggcagggccatccaccagggcctctatggggcatggagaatgtcttcctcaggcatttgcttcccctcactccccagtcccccactcccccttagcacacatgcacagcccccaccaggaacagggtctctttgtgggcctgatctgcccagctcctctggaaggctcctcrataaacaaaccttcctttatggggtggtaggtttactggagacgggaaaaacagcagaggaggggtggaaggcccaacaggaagaggtggctgctgctcacagttgggggtttggaagcactggagatggccctagggggccttttgtggggccagggcagtcccactccttttatatgtaagaatcctaggagggcagtggtcgagactggcagcagacagggattagggtagggatgtgacaaggygaggaagggaggtggcagagctgctcaccttggagatagccagagggacagggaacctggggacgggggatggtgccagctgtggccctggctcctggggcctccaggaagggaagaaggaaccagggcagagcccacagccaggagctcaccttctccaggttggtgttgtccagccagagggtctccaggtatctgccaaaggactggaaggcattgtccgggatgcttttcagggggttgtgggacarcttcagctcctccaccacccgtagcttgctcagggcagctgaggggtagctggacagctggttcctgtccacgtggaatttggcgaggttctccacrtcgtccagggccccgggctgcagggagctcaacgcgttttccgacaggtagagccagcgcaggtccttggctccctggaaggcgcctgcgcgcagctcacggatcttgttgttgttgagctgcaagatgaagaggttgaccagcggggagagcaacccccggggcagctcagtgaccttgttgtggtccaggtagaggtaggtcagctcggtcaggtcgtcgaaggcacctgcgcgcagcacgcggatgtcgttatgggacaggtacaagtagataagttgcttgaggccgcggaaggcaccggcggccacctcgcggatctggcagtgctgcaggtgcaatgacacgaggttcggcatggcccggaacgaattggcagccagcaccgggaagttgttgcgctgtaggttgagcagcttggtcttctctgacaccttggggatcttctgcagccccaccttgtcgcagatgacgtgctgcaggtcgctgtggcagtggcagttctkggggcaggcggccagcgccggcagcagaccagccaggaggccgaggctgagcaagagcattgggcggaccatggctgggacgcctggggccggggctgggggcagcagcggcggcggggcgcgggcagcsgcgagtcctaggcgctcgggtctgccgccctctttatacggtggccctgaccgcagccggcagccgagccagctcctacgtggagcatcgaggccactgggcttaactcgctcgcgcccagagatgcgcccccgccctccacggggaagggggcggggccgttcccccagccggctaccgtgcatgagggggtgggaccgtggcccccgagccccgagccctgagccccggctgtagccccccgctctcctatggtgctcctctgcctaccgcctttcccggggcttttctgggaagggggaatagttatgtctggagccccgagtttacatcggagagagggaggcgttccctcaacttatttgtttgctcaggtttgagcctccacgccgcgccatccacacacgctcggccgggtgccctggatgcgaggcgggaggaagcggggccggacagctggatgcgtctccctgcggtgggccagctgcctgcgctttaaaggggcgcttgtgcggcgcctgccgagcgtgagagccgccccggcgtcggtctcccacttcrgactcgacgcgccgaagctggccctgggtagacccgagctccttccccaccctcgggcgcgcccccacccctctcttccaaccccgcttgcgtttctgtcgccggcgccctcatcccctttttccaccgctgaaggctaagcagagaagtgggaagtgggggagagtggcccacaggaatggcaaacacacctggaaaccacaggccacaagcacagtcgcaccatcccccctccttcatcgccccgaaatatctccatccctcatccccaaccctagtggtcaggacccgcccctgaggggtctcagggtggcggctgagtggcgccgaggtgtacttggcagatgccacattcgggcggtggccccaggactgtgaggaggggtgcgggagggggtggggcaggtcgagggaccagccctggacggctctggctgccagaccctaagttctgtgggcagtcccgccccagcccgccagatttctgtgtgcccacttgccagccacgatgtccggattcctgtggaaaggggagggtgagcaggcagggtcacagctctggcctcagggtgagctccaagctgcctggcacaggatattgtctgtgatgaggggtggaaggagaaaccagaacccacaytgaaccaaaccccagccgtgccagagccagagcagctgatatgggggaagcttggtgcagggaggaggatggatgagatctggtrtccgttgattaaaggggacctaggatacrgggtaactagcctctcttcccttacccagtaccctcgtgttggggcctggtttccagggcctgcccttttcccaaacctctctgccccttgcctctaggataggagggtcatacttggcctagaccattccttgatggtatttaggcttctccaaggctggcttctggtttttctgttgctcaggctttccaaccactggaaatgggggaggtggggtgggggtaccactggtttttaaaatcactgcttaggttgtttttttattttgatggaaataaattcacgggaaactctccagagcttgggggacgcctgccccaaggccaggcacttgttcagggtttgcagaatgcgggggtggggttgtgtctgtgccactcctagctgggccaaggcaggctggctttctcatcaagtttatggggccttcagcttggaagggaggagccggggatgtggcctgaaatcaggaaggtggggttaaggcagccaggggatggggggagaagtgtggggtgttggtaataccggagccacaggcacagacaggtggctgctccagggaaacggggcactgagagagctccagctggaagagaatggtgtccctgctctcaattttctttcagatctggggccctgcagagatctagtctgctcactcccagcacctctgcctcctgaccccaggcccctaccaatgatgtctctgtttccaccattcggctgccctccactttcccttttcttttatgaattccttcccatttcctcagatagctcacctgatccctctgcacgtgctgagccctcttcaaacaccctttctggaccctctaggttgcttatggaaccacagagaacagtcccgtgacattcgcgcacttccctgaggacactgtggagcagaaggcagaaagcgtgggcagaattatgcctcacacggaggtgagcccctgaccaagactccaaagtcccacctcccgtcacccagctggggtgcacccagctgggacatcggttgctttcagtgagagagtcaaatggctcactcaggatgcctagagccccccagcagcaggggtgtgctaggcctggcccggagtgttctctgtgggctaagcatgaaaggggaagagctggaacagtggctgtgagcggctgccagctgaacttctccgcggcctcccttcctgtctgaggtgtgtttttgccaagcccactgtctgtttcagggcagccagggtagcctcaaagaggagccagagcacagagagttttcctacacagcttcttttcctccagtggtgctcgcctctcgctttagcagagttcttcttcttgcttggcgtaaacacttcatttcccaagcagcctatccctttggggcggtccctttgcccctcaaaggttgccccagagtgcacctgaatctcaaatgcccagccatgcctcctttcctgctccaacactggggctgtgccagctggctcctgatttcccctgcacccttctgctcccgcccctgggggatcgctgcccccgtgcacaagcagctgcttcccctggggctgaccgctgtcctggcgtgaatctgccctgccctcccgccagagcarccatgtacccagggattgagtagggatgtgagcctcctcccgtgtgtgctacagctgcactgccactgtcactaagatgcccacctggaagggaaacaggggcaggcatcactcaccccatttcacggacacagacactgaggcacacagaggctcagctttccttggcacggtggccgtggctcttttctctaccaggctttcagactctgtctctcctgttcacatggtgttgccatgccaccctgtttggcttatttgctgcttaatgggaagtaagaggagactcccttctcctctgcacggtttataattcttcagctggctctgcagtccacaaacctctttctttgcagcagctgcctgcccactctgtttcctcagccctcccagcctgggactcagytcttctttcatgcccagctcaggtctctcactggctttgggtcgactctagcctttgtctcccttctctggatggggataagcagagccagggggcctcattccaggcagttgggttggggggttgggggcaggcaaagctctctccatttccaaggaccacctatcctgaagcaagaggataggaagccccaacctgaggccatcctgtcccaggcscggatcatgaacatggaggcagggacgctggcaaagctgaacacgcccggggagctgtgcatccgagggtactgcgtcatgctgggctactggggtgagcctcagaagacagaggaagcagtggatcaggacaagtggtattggacagggtgagaaggcagggcggggtggaggctctggccgctgaggggaggctggaggtcttgaggctgagccgggaacattaacctggcaccgtgaggatgtgggtatcaagatgacccctcacatgctggagtcttaatttccaaaatgtatacggtggggatgatcatacatagcacagaagaaagcaactgggtcatcaccctacaccagcagctgcaaaatctgagtccagattcagtcactcatttgttagctcagcaaattcttactagaattccttatgtgctagcaccgttctcgccgctagaggtccagaggaaagtaagatgagaaggatcctgctttttggaggaagacagatgatgcccaacatcgataaataacaccaagaaaataggccaggcgcggtgactcacacctgtaatctcagcagtttgggaggccgaggcgggtggatcacctgaagtcagaagtttgagaccagcctggccaacacagtgaaaccccacctctactaaaaatacaaaaattagccggacgtggtggcggcacgtgcctgtagtcccagctactcggaggctgaggcaggagaatcgctgtaacccaggagatggaggttgcagtgaaccgagatcgcgccactgcactcaagactgggcgacagagcaggactccatctcaaaaacaaacaagcaaatgaacaaacaaaaaacactaagaaaatgaaatagggttataggagagaaagtggctgtggtggggaggggagcttcccttagattgagtggacagagaagatgtctggagacatttgagctgagacctggaaagaagccagtcgtgaaaagctatgtatagatgtgttgagagagacagaatatgttataggtattgttttgtttttgtctacctcccctccccttactggactattaattccagagactgtgtcttgttcctgctatgtctcccagagtctagagcagtggaagacacatagtagctggtcaataaatgtttcacgactgagcaagcaagtgagtgaacaaggcagagatgacaggttgcccctgggctttccttacagagatgtcgccacaatgaatgagcagggcttctgcaagatcgtgggccgctctaaggatatgatcatccggggtggtgagaacatctaccccgcagagctcgaggacttctttcacacacacccgaaggtgcaggaagtgcaggtgaggcacttggctcaggtgagcccycagaaacaagaaacacacatgaacacggtgatgtctgatatttttctttggccctggaaggtggtgggagtgaaggacgatcggatgggggaagagatttgtgcctgcattcggctgaaggacggggaggagaccacggtggaggagataaaagctttctgcaaagggaaggtgggagcctccgctcaacctagctgatgctgctctgttctttgctcacccactcctctgccaaccagcccagggtggggattgctctgcccttgacgaagctgactcctggccaggccagcccctggtcccctacccatacccctgtgagcttgcgcagcctcacgccttacctccctccctctggtctgcagatctctcacttcaagattccgaagtacatcgtgtttgtcacaaactaccccctcaccatttcaggaaaggtgtgtaaggtggaggaggctggggagggcagcctgggctctggggccccatagggccccacctctgtttccttcagcaatgggtgtggagagactggcagtagggtgaccrggtcacctaatcctggtttgcctggggactttccctgttttggcactaagagcctgagaaaccccttattcttgggtgaaccaagacagctggtaaccctaactccattttctttcctctagatccagaaattcaaacttcgagagcagatggaacgacatctaaatctgtgaataaagcagcaggcctgtcctggccggttggcttgactctctcctgtcagaatgcaacctggctttatgcacctagatgtccccagcacccagttytgagccaggcacatcaaatgtcaaggaattgactgaacgaactaagagctcctggatgggtccgggaactcgcctgggcacaaggtgccaaaaggcaggcagcctgcccaggccctccctcctgtccatcccccacattcccctstctgtccttgtgatttggcataaagagcttctgttttctttggcttcttgctggtgggctctcttggcagctactacaggatggagaagggaagacactgaggggaactagcactttcagacgtcctattccttgtcattgagagtgcagagcaccttgatgtggattatctacttaatttaaccctcacccttggtatccctttgagataccaacccatttttgttgttgttcttgttttttgagacagagtcttgccctgtcacccaggctggagtgtagtcatgcgatctcagctcactgcaacctctgcctccctaattcaagtgattctccttcctcaccctcccaagtaactgggattgcagatacccaccaccacacccaactaacttttgtatttttagtagaggcgaggttttaccatgttggccaggctggtcctcaaactcctgacctcaagcaatccgcctgcctcagcctaccaaagtgctgggattacaggcatgaaccactgcgcctggccccaattttttatttttaagctactctaatttaattctttttcacattgttgccagattagtctagcaagaagtattctttttatatatgtataacagcttgattgagatgtaattcacatactctccagttcactcccacctcccccattttctagagacaggatctcattccgtcacccgtgctggagtgcagtgactcactgtagcgacatgatcatagctcactgcagcctcgaactcctgggctcaagcagtcctcccacctcagcctcctgagtagctgggactgtaggaatgtgccaccatgtcttaactaatttttaaacatagacacaggatcttgctatgttgcctaggctggtctagaactcatgggctcaagcaatcctcctgcctcagtctctcaaagtgctgggacaatctaccatttaaagtatagaattcagtggtctttagtatattcacaaatatgtgtaactatcaccacagtcaattttaaatattgtcatcacctaagaaagaaaccccatactctttaactattatctcccatctcccagcccccttcctccccaaccaacctcatttttagtttttatttgttttgattggtgaacctggggcatccctcgtaggcagggccagataaagcaggttgtaccttgacccaagaaataaaaacagctgggttccaaaaggcacatagattcccagttcacaggaatggaaacttgcctcctgcctgcccccttacctcccagcgcgcctgcccccttacctcccagcgcgcctgcccccttacctcccagcgcgcctgcccccttacctcgcagcgcgcctgcccccttacctcgcagcgctcctgcccccttacctcccagcgcgcctgcccccttacctcgcagcgcgcctgcccccttacctcgcagcgcgcctgcccccttacctcccagcgcgcctgcccccttacctcgcagcgcgcctgcccccttacctcccagcgcgcctgcccccttacctcgcagcgcgcctgcccccttacctcgcagcgtgcctgcccccttacctcccagcgtgcctgcccaaggcagcagcagcctcctcttgactttttaagaaatgaacataggtttaaggtattttcagtaccaggctctgtgctaggtactttcacattattttctctccaaatcttcccaacaatcctttcaagtagccattggtcccacttcaccaatgacccaacagaaactcagggaggttccgtatcttgctcaaggtcacacagctggatcagaacccagctgtctgttaggcaggttcactgcacactagttaccaacttgtcagagtccagtgaggcaaacacccacaagttacataacgctgagtccagcgaggcaaacacaagtgacatgcaacgtgtttattacctataggtaggcactaagggacaacagaaggctgggattcatttggagctggacccctacggctcaggaaagctgctgaggcagctgggggatggaccgttgtctgtgcatgcctgacttttttttttgttgttggtttgttgtgagatggagtctcgctctttcacccgggctggagtgcagtggtgtgaaccctgggattcaagcaattttcctgcctcagcctccctggtagctgggattacaggcgtgcactaccacgtccagctattttttttttttttagtagaaacagtttcgccatgttggccaggctggtcttgaacttctgacctcaggtgatccacccgcctcggcctcccaaagtgttgtgataacaggcatgggccaccacgcccagccagccagacttgtactgaagctgagggaccccagaaaccagcccgccctgtttttcgtttgtttgtttgtttgtttgatacagagtctcactctgtctcccaggctggagtgcagtgtcgccatctgggctcactgcaacttccgcctcccaggttcaagcaattctcctgcctcagcctcccgggtagctgggactactggcacgcaccaccacacctggctagttttttgtatttttagtaaaaacggggtttcaccgtgttagccaggatggtctcaatctcctgaccttatgatccgcccgcatcggcctcccaaagtgctgggattacaggagtaagccaccgcgcccggcttctgccctgggctttataccctggggccatgtgacatgttgggctgaagtgttgaaggacatgctttttctagggggactggaacagagcatggctgtgctggccagtccttccttccctcaggatgttgcattctctgcacactctacagttttatttatttatttattgagacagtcttgctccatcacccaggctggagtgcagtggcactgtctcagctcactgcaacctccgcctcccaggttcgagggattctccctgctcagcctcccgtgtagctgggattacaggtgcccaccaccacgcttggataatttttgtatttttggtaaagacggggtttcagcatgttggctaggctggtcttgaacttctgatctcaagtgatctgcccgcctcggcctcccaaagtgctgggattacaggcgtctacagttattcttgagaactacaagcaagaaaggaggggagaaccaggtcagttcaaggccactgggagaactgtcctgcaccgcctgcctctgaagcccatgatgtttctgctttgtgggacagttgttcaggtgcctgcttccccaggccttcccctgcgccttccccctctctcctacacacaccatctgactgtccttccagcacgtacacctccagatgcttgggttggcctgacccaaaacagtctactctcccggccaagccaattgcccctgggattttctgctcctccaagatcccgtgcatagccctggtggtggctcatgcccttaatccttagttactctagatgctgaggcaggaggatcgcttgaggccgaggagttcaagacctcccctctcccaaatatttgtaaatgaaattaaaagaaagatccagcccaagtgtctcttctgccctactgactcccacactcttaaaacagatgacctcacagcactgaggcggacggctctggtgtccagcaggcacggaattaatacgccttgcctgtcctggccggttggcttgcctctctcctgccagaatgcaacctggctttatgcacctagatgtccccagcgcccagttctgagccaggcacatcaaatgtcaaggaattgactgaacaaactaagagctcctggatgggtccgggaactcgcccgggcacaaggtgccaaaaggcaagcagcccgcctcgcggcctggggaaagaaccgacaggaggccgcagtgagcgcccgggcgcccggcaggtggcgccgcagccccgggcccgggccctcttgtcgcgcggtcacgcagcccctcttccttccgccggctgcgcactcacagtgatccctgcgcgcgtctcctgctcgggtcagtgcgccgcgctgcgctgggcgccatggcgctccccggagcccgggctcgcggctgggcggcagcagccagagcggcccagaggcgccgccgcgtggagaacgcaggagggtccccgagtcctgagcctgcgggccggcgcgcggcgctttacgtacacgtgagtaggggcgggggcggagcccacggtgtgtggccgcagccctggccgtgaccgtggccgtccaaaacccaggtggcggtttgtcactctatgaacccgcctgccgtgtttccgtgcccccgtacgaggtctgggatgggaccctgtgctttggcagggaaatgacttggtccagaaacctgaagtctctgctactcaccggctcggtgactctgaccaaatggttcaaatttcataacaattttcctcttagcaagacaaaattttcttaagagcagtgttctgactcggtagctgggaaaatggctcataggaaaattgtatgaaaattatatgatcccagaaagagcttgggttgaattccttcctgacgkctgctggttggaagaggcagcgtaacaaaggagtgagcctcagttttctcacattgaagtggatgtaataaccccagtgcgacctgccttggggagttgtgtggcttagatgtcctagctactgtggaaagacctcgggataggggtgggggtggggttgggggtgtgtgcgactgaaccctggaagtggccagggcagctctcaccgcgcacgtgcactcactgcccccagtggccttactgcgagaagcgctgcagttactgcaacttcaacaagtacatccctcgccgcctggaggaggctgccatgcagaagtgtctggtgaccgaagctcagacgctgctgcggctcagcggggtgcaacggtgggtagtgggggctgtaggcagcgttttgggaaatatttggaggagtggtgggggataggtgcaggcatcccagagggctcccccaggtctcatttctccrttctctttccccagggtggagtctgtgttctttggtggggggacccccagtctagccagtccccacacggtggctgctgtcctggaggctgtggcacagrcagcccacctgcctgcagactyggaagtcacattggaggctaatcctacttcagctccgggctccagactggcagagttcggggcagcaggggttaacaggttgtctataggcctccaggtaacccatggcactcaccccatcccagtgcaccccgcccttcagtgccatctcctctttggtcacattcattcattgggcaaacattgattgagcaccttctgggtgccagggacacagtagggcctagtgcgacacttttataactccttaattgtctgctgctgtcatagaccacagactttatgagaaagggatcaggtgtggcttttctatttcaaacacttaccatagtgcctggcacatagtaggtggtcaaaaaagatttgctacatgacacgggagacgcagacatgtagccagattattgcagcatggtaaatgtcacctgtaaagggggtctctataaaaggcttctagagtacagcctgaagggaggtcactctgatgaaatcactgaaacttctctggaggagatgtttgaatgaagaggaagagttcaccaggtgagggggtgtgggggaaacgacacaggccatggaagagcctggcatgttttgggggagttgtgagtcattccttgtgattggagaggctggaaacaaggttgcaaggtagagtccaaaacctttggtgcctactaaggagtgtgggttttgtcctagtaatgatagggagccattgaaggtttttaagtagggagaaacctagtcgtctcaggttgacctccgatatttccgtaggacttccgggttgtgggctttgttctgatggaatatgctgacagaaacacatcacttctaagatattctta

SEQ ID NO: 95457 - DNA, 55346 bp, Homo sapiens
gaaagaaagaaaaacagccagttttctatgctacccacagaggggtccatatggggttgttatggattcccatcataacttaaagggaaactttcacaatgtccagagcccttgctgtcctgcaaatgaaggaggaggatgtccttaagttccttgcagtaggaacccacttagtggcaccaatcttgacttctagatggaacagtacatctataaaaggaaaagtgatggcatctacatcataaatctgaagaggacctgggagaagcttctgctggcagctcatgccattgttgccattgaaaaccctgctgatgccagtgttatatcccctaggaatactggccagagggttgtgctgaagtttgctgctgccaccagagccactccagttgctggccacttcactcctggaaccttcactaaccagatccaggctccttccgggagccacagctttttgtggttactgaccccagggctgaccaccagcctcaaacagaggcatcttatgttaacctacctaccattgctctgtgtaatacagattctcctctgcagtatgtggacattgccatcccatgcaacaacaagggagctcactcagtgggtttgatgtggtggatgctggctcaggaagttctgcacaaaggtggcaccatttcctgtgaacacctgtgggagctcatgcctgatctctacttctttttttttttttatttgagacgcagtctcgctctgtcgcccaggctggagtgcagtggcgcaatctcggctcactgcaacctctgcctcctgggtccacaccattctcctgcctcagcctcccaggtagctgggactacaggcgcctgccaccatgcccggctaatttttttgtatttttagtagagacggggtttcaccgtgttagccaggatggtctcaatctcctgacctcatgatctgcccgccttggcctcccaaagtgctgggattacaggcgtgagatactgcgcccggcctgcctaatctctacttctacagagatcctgaagagattgaaaaagaagagcaagctgctactgaaaaggctgtgacaaaggaggaatttcagggtgaatggactgctccagctcctgagttcacygttactcagcctgaggttgcagactggtctgaagggtgcaggtatcctctgtgcctattcagcagttccctactgaagactggagcactcagcctgccacggaagactggtctgcagctcccactgttcagaccactgaatggttttaaattgttcttgcagggactcttaagcaacttggaaataaggttgatggaaaataggcatcagtttctttttttttttttttgtttgagacagtctcgctctttcgccaggctggagggcagtggcgcaatctcggctcactgaaacctctgactccctgtttcaagcaattctcctgcctcagcctcctgagtagctgggattacaggcaggctaatttttgtatttttagtatagacggtgtttcgtcacattggccaggttggtctcgatctcctgacctcgtcatccgcccgccttggcctcccaaagtgttgggattacaggtgtgtgtgtttatggccaccgtgcctggccataaacatcagtttctaaaaaaaaaaaaaaagaaaaatatctaaacaagaacagcatcttcttccatttgaatttttttctccaagaaattctgagcagattatccctttacctttttttccttttttttttttgagacagggtctcactctgttgcctaggctggagtgcagtggcacaactttggctcactgcaacctccgcctctggggctcaagcaatcctcccgcctcagcctcttgagtagctgggactacaggcacatgccagcatgcccggctaatttttatattttttgtagagatggggttttgccatgtttcccaggctggtctcgaactcctgggcccaagcaatctgcccacctcagcctcccaaagtgctgggattacaggcatgagtcattgcacctgtcctgcctttttttcctcccctcccctccctctctctctttctctctttctttctttttgatggagtctcgctttgtcacccagtctggagtgcagtggcgcaatgtcggctcaatgcaacctctgcctcccgggttcaagcgattctcctgcctcagccttcccagtaggtgggattacaggcatgcaccaccatgcctggctaatttttgtatttttagtagagacggggtttcaccatgttgaccaggcctgtcttgaactcctgacctcaagtgatctgcccgcctgggcctcccaaagtgctgtgattacaggcgtgagccaccatgcccagcctcctacatttttttttctgaagtcttacatgttacaccttcagaaatgcctttcctgcccacctaatactcagagttaacactcatattgcactcactctgtgctagacaatgtttttttgtctttgttttttgttttgagacagagtctcactgtcaccctgatgtagtacagtgacacaatcacagctcactgcagccttggcctcctgggctcaagtgatcctcccacatcagtctttagagtagctgggtctacaggtatgtgccagcaccaaacctggctaattttaatttttttttttttttggtagagatgaggtctcactatgttgcccagtctggtcttgaactccttggctcaagtgatcctcctgccttggcctctcaaagtgttggaatcacaagtatgagccactgtgcccggcccagacattgttttaagccattttcatataccaactctgttaaacctttgtacaagcctatgaggtaagtagtattcttacaatctccagaggaggtaagcattattattatctccatattggagctgagaaaactggagtacagaaaggataaataacttctccaaaccaaaatcacacaataagtggtagagcctgtatttgaactctgcccacatggtgctagaagctacatcctgtactttacctcctctgtgttatcaacctaaagtaggcctcttttttttgagacggagtctcgctctgttgtccaggctggagtgcagtggtgcgatctcggctcactgcaacctctgcctcccaggttcaagtgattctcctgcttcagtctcctgagtagctgggatcacaggcacgtgccaccacaccaggctaagtttttctttttctttctttctttttttctttttcttttttttaagacggagccttgcattgtcacccgggctggagtgcaatgacgctatctcagctcactgcaaccgcaacctccatctcccaggttcacgcaattctcctgcctcagcctcccaagtagctgagattacaggcacacaccaccatacccggctaattttttgtatttttagtagagacagggtttcactatattgaccaggctggtctcaaactcctgacctcatgatccgtccgcctcggcctcccaaagtgctgggattacmggcgtgtgccaccatgctgggcccttttttttcccccaaaggacacaagtacaggtaagaaaatgtagttttttgttttttttttttttttagacagggtctcactttctctcccaggctagagtgcagtggtgggatctcagctggtcaggaactcctgacctcaaaaagacctgcccgcctcggtctcccaaaatgctgggattacaggcgtgagccactgtgcccagccaaaggtagacctcgtctactccatttttcttgcttatagtacctcctattttcccttttgagtactaatcacaatttgcaattaaatatttgctcactgccaggtatggtggcttacacgtataatcccagcactttgggaggccaaagcagcggaatagcttgaggccaggaatttaaaaccagcctcagcaagacctcacctcaacaattttttttttttttctgttggccaggctggagtgcagtggcacgacctcagctccctgtaacccccacctcaaagcaattttcatgcctcagactccggagtagctgggattacaggcatgtgctacaatgcccagctaatttttgtatttttagtagagatcaggtttcaccatgttggccaggatggtcttgaattcctagcctcaagatatctgctcaccttggcttcactactgggattacaagtttgagccactgcacccggcctcaacaaaaacaaaaattttaattacctcaccctatgcatctcttcatttgtatcctttgtaatatcctttatattaataataaaccagtaaatgtaaataaataaataaatactgtttgtctcttcccagcagattgtaagcctgattagggcagggatcatatctgttttattcacatcataagcactgtgtaacctctggtttcttttctctttgagatggagtttcactctgtggcccaggctggagtacagtggcgccatctcagctcactgcaacctctgcctcaagcaattcaagtgatcctcctgcctcagcctccccagtattttgtatttttagtagagatggggtttcggcatgttggccaggctggtcttgaactcctgacgtcaggtgatctgcctgccttggcctcccaaagtgctgagattacaggcattagccaccgcggcctggccaataggcactatgtaactattagtttaatgaatgaagaaatgaatgcttgtgggcatcattcattctgcaacaaacttctaaaaattaattttactttgaaacaatttcatactttcagaggagttacaagaataatacaaagaagttcacccagatatctcattcagggttagccaattgtccacaaaatatactttagagagcaagaggattaattccagggtctcttgagcaacaaatatttattgagcgcctgctactattggattacataacagtctcttaactggtctcttagctataggcattgcacccccacccctagtcccatacagcagctccttttactaatttatttttgaggaggatctcgctctgtcgcccaagctggagtgcagtgccgcgatctcagctcactgcaacctccgcctcccaactcaagcggttctcctgcctcagcctccagagtagctgggaccacaagcacgcactaccgcgccaggctaattttggtactttttgtagctacagatagaatagagatctttgtctattttgttcacgaagtactgcaagcgccttgagctgtacctggcacatctttgttgctcagcaaagagtggttggataaacgaacgctgaaggtatgctagtaccaggtactgttctcggtgctggagttacagcaaaaaactccctgccctcgtgggattctcactggaagcatgcttaagcttaagccatttttcaatcttgaccccaccattttgttccctgtgagatttggggtgaactgcagtttcctagcctcactttcctatcaatcgttacgaagattaaaaggaaaaatatcatttgtatcgcatttagcatcagaaatgctttaataatattcgtttcccttcctttcaggctggaagactggggcctgacatctctgccacaggcttaggcgaggttttcacagggacttggaaaggtgcaaacggttactacggccaggcttacccaattgttaagtgaagatattctggagagtgcttaaaagggttggaaaaacaaaccagtgagtggctaggaccacctactccgctgttttgcctcggaaaagcctcgccggctgccgggaggtgaaagtctggaggaacgggaggaaaagagaggggtggctgtccacaacagaaaactacacatcccagcacccccgcggcagacgactacgggtcccagcaggtttcgcggggtggaccgaagcgggctctcttggggcctgcagtcggggttcagccagagggggcgccgggcgtaccgacgtagcggggagaaacgggtcgcgctttaacggcgctgcgcaggcgccactcacgggccggacgtgacgcagggaaagttccggcttcggcctccgccgctgccgccgccgctgctacagccgccgccgccgctgttgccgcggcttgttattcttaaaatggcgccgctagacctggacaagtatgtggaaatagcgcggctgtgcaagtacctgccagagaacgacctgaaggtgagccctatttgcgggctcgccccttccggctgtggggcgcccgccggccggcccttyctttctccaggacccccgccgggtatccagtccagtcgcggtggagggcctcccccattgccagtcgacccggtcctacccggcgtcacgccgagggtctcgcgagccgagtcgtcgaatgctgtcccggttgcctcagtggggatcccgagggatgtcgcggcctctgtcccagggtcgccccttctggccttcgggctgccccaggacccgcagctgtaacagctttatttagaaggctcggctccccaccccatccctgggtctcccgcagtcggarscgagcccccgcggcagtgccctcgggatggggtcgcctccaccggaggtgacaggagcgcggagtggccggcgtctgacaggagatgccaccggctaccggaacgcggcctcagtgtgtttaggtctctgaggaaggggaaggcggtgggcccgagtggtttggtactggcgggagcgaacgtcaggtcgtccctcttcattgccactcctccaaattgctttttaggatcgtcggttttgctaattcagaggtgaatcccgtttctgagtatgttgttgagcttactgaagtggataaagtagttggttctcaataaatacaaatactttctccttaaccccttcttaactcagtatttcattttcttcgttttctaaaggaggtgagttccttgttactcctgagtccaagtaagagtaaatgtatgtatgggtaaaggaatgactttggtatactgcttttcttttttaaaactttttaattattattattattattattattattgtttttaactgagatagagtctcactctgtcacccaggctggagtgcagcggtgcgatcttggctcactgcaacctccacttcccgggttcaagcgattctcctgcctcagcctcccgactaggtggaattacaggcgcccgtcacgacgcccggctgttttgtatttttagtagagacggggtttcgccatgttggccaggctggtcttgaactcctgacctcaagtgatccgcccgcttcggcctaccaaagtgctggtattacaggcgtgagccaccgcgccggcctaggtatactgcttctttgaaaagtgtttctatgcatttgctgaaatcagagcttaggtttctagcagtgcttatcagctcgtgctagtatttaaccgactcagtgtattctttttttttgagacggagtctcgctctgtcgcccaggccggagtgcggtggcaccatctcggctcactgcaacctccgcctcccgggttcacgccattctcctgcctcagtctcccgagtagctgggactacaggtgcccgccaccacgcctggctaattttttgtatttttagtagagacggggtttcaccgtgttagccaggatggtctcgatctcctgaactcgtgatccgcccgcctcggcctcccaaagtgctgggattacaggcgtaagccaccgtgcccagccccgactcagtgtattcttaaggaaatatattactgtgggttttgttttatttcttctttgtacagtaagttgatacttaacatcagtcaacaagtatgcataatatttgaggccacacgtgctgttgtgaatgtgactgaattgtacttacctgttaattttatgtggcatatgataggggagtcattcttgtgcattytcccgtttttaatagaataatttcaaataaggacagccttcgttagtagtaatgtagcatttgtgctcatctgagtccttcagacattccttttgtggcttctttctgctatgtggtttttttaagggaataagaatacaactagcattgggacccaattcatggaaaactaaccagacctcttagtagcattattaatcccataggtgaggttgactattgcatgtcagtgaattgacatggaattttttcttcttatttatcatgcataaagcttttttgaactttgtgtttatgatgaataaaatgttgctttttatgaaaatgtgtctagggcacagtggcgtaatctcagtacttggggaggctgaggtgggcagatcatttgagatcaggagtttgagaccagactgaccgacttggtgaaaccccctctctactaaaaacacagaaattagccgagcatggtggtaggtgcctgtaatcccagtttacttacttgggaggctgaggcagggagaatggcttgaacccgggagaattgcttgcagtgagccgggatcacaccactgtactccagcctgggagacagagcaagactctgtctcaaaaaaaaagaaaaggaaattgggcactgaaatgatttgaaagataatctggccaggtgcagtggctcacgcctgtaatcccagcactttgggtggctgaggcaggtggatcacttgaggtcaggagctcgagaccagcctggccaacatggtgaaaccccgtctgtactaaaaatacaaaaataaactggaggtggtggcaggtgcttggaatcccagctacttgggaggctgaggcaggagaatcgcttgaaccagggaggcggaggttgcagtgagccaagattgcgccactgcagtccagcctgggtgacagagggagactccgtctcaccaaaaaaaaaaaaaaaaaaaaaaagaaagaaaaatctgttggacttctttgtacctcttagtttgataaacattagatttccttcttaccttaaggaagtacaatttttagaccattttatttcttgttgaaacatagctgcattgtacttgacttgtatttgtttctttttttttcttaaaaaaatttttaatcttttttttggtgggggagcggggacatggtctcactctcacccatgctgtagtgtggtggcacaatcatggctcattgcagcctcgacctcctgggctcaggcagtcctcccaccttagcctcctgagaagctgggaccacaggcacatgcccccatgaccagctaatttttatttatttttttggtagagacagggtcttgctatgttacccaggccagtcttgaactcctgggctcaagcgatcctcccaccttggcttcccaaaatgctgggataacaggcatgagccactatacttggcctgtatccatttcttaataaacttaaaaatatatgttttgggcaaccaagacaaaagtattctgaatttttctttataggtagagacttttttttctgtcttggaaatgcttttatcagattaatttgttgtgttgctcatctctggtgtatttaaagaaatttaatttttttctgtttcttggcatgaagtgcaacctaaaattaggccaagaaagtatgccaggagtactttttctgaggctgtaaaggcaaaataaaacattctattaagaaaagtaatcattgaggccacttaatgagcaagatggaaaagatttgttctgtagaaaagaagacagaaatttacttgtgttttaaattgattagaagataaaatactaaatgcatacgatgttccagatttaatcacaatttctgtttygctaagttggaaatggtcacatcactagtactggatcaaatctacataactgtttttgtttgtttgttcgctcttgttgctcagggtggagtgcaatggcgtgagcttggctcactgcaacctctgcctcccgggttcaagcgattctcctgcctcagccttcctgagtagctgtgattacaggcatgtgccaccacgcccagttaattttgtatttttagtagagaccaggtttccccatgttgttcaggctggtctcgaactcctcacctcagatgatgcacccacctcggcctcccaaagtgctgggattataggtgtgagcctggcctgttagtttgtttttttgagacggagtcttgctctgttgcccaggctagagtgcaggtgcacgttctcagctcactgcaacctccgcctcccggattcaagcgattctcctgcctcagcctcctgagtagctgggattacaggcacccaccaccactcctggctaatttttgtatttttagtagagatggggtttcaccatgttggccaggctggtctcaaactcctgacctcaggtgatccacccttctcagcctcccaaagtgctgggattacaggcgtgagccaccatgcctggcatacataacagttttgaaggaataagaatgacatatgtgggccgggaggctgaggcaggagaattgcttgagcctgggagatggaggttgcagtgagccgagatcatgccactgcactccagcctggccaacagagcgagaccctgtctcaaaaaaaaaaaaaaatgacatatgtgaaagtaaatggaccacagtgtaacctttcttataaagagctcatgtgattttatccacaagaaagatttcagagagattaataaaagatacagattccatacctggctaaatggaagaattaatgataaaggcaggtttactgaatacttatatttaagtattaatatttttggggagcaggggttctataacttggaggttgtctaatctcttggacagttcttaagggtgacatgtttacctgaggttttttttttttttttttttttgagactgaatctaactctattgcccaggctggagtacagtggtaccatctcagctcactgcagtctccacctcctgggttcaagcagttctgcctcagctgggattacaggtgcgcactaccacacccagctaatttttgtatatatatattttttggtagagatggggtttcaccatgttggccaggctggtctcgaacttctggcctcaggtgatccgcccacctcggcctcccaaagtgttgggattacagatgtgagccactgtgtttggccattccttatttgtgttttccacaattttagaacactgccctgtatgtgataatcagtaaaggtttattgactcaaactgtttactgctttatgacaaatacttgtttcttcttcttctttttttttttttctttgaggtagggtctcagtctgctgcccagggtggagtgcagtggtgcagttgtagcttgctgcaacctcaaactcctgggctcaattgatccttctgcctcagcctcaaaagtagctgggagtacaggtgtgcaatagtgtgcccagctgattaattattatttttwtttttgagatggagtctcactctgtcaccaggctggagtgtaatggcgcgatctcggctcactgcaacctctgcctcctgggttcaaacaattctcctgcctcagcctcccaagtagctgggactacagatgcatgccaccatgcctggctagttttttggtatttttggtaaagatggggtttcactgtgtttgccaggatggtctcaatctcctgacctcgtgatccacccgccttggcctcccaaagtgcagggattataggcgttagccaccgcgcctggcaaaaaaaaaatttttttaagggatagcgtcttgctatgctgtccaggctggtcccaaatgcttcargtgattctcctgccttggcctcccmaaatgctgagattataggtgtgagccactgtgcccagccaacaaacacttatttacatggttccttgtgttgagtactgttccctgtgggtgccaggggcagaattggatacttgtgtctgcctttgaggggctttcaatatagtaagggaggtaaggaggtaaacaaagactgtaatagaggctgaccagggtgttggcaaacagaagaagcagtatgtaactttagagtcagagatgatttcataaaggagcagttacgaggrgcagagttcaggtagacaaaatgagaaggaaagaacatgcaaacagaataaacaccatgtgcaatagtataatgtaatttgcaagaacatggctggttcggggaacttgaagtggtttggtatggctggaggtggtactggaaagaaagatgccaaatcatagaagagtaggctgttaaacttagattgttattttttaggtggtgcatgaacactatgaaatgtttttatattttagggaaaaatcatactgtgattcgtgatactgtttaaaatgtagctaactaaaaataaaagtagattcaaagaaaattattacagggatacactgttgtatgtggtaggaatatgacaaaataatgaaaatggtatttggtgtttgggaaacactgccataaatggaggaatacgcttgaggagtttttaagaaggagaatgacagtaggcttttgaaatgtttattctggcagcattgtggaccatggattggaatgcaggaaaaatgtcatagaagcagtaggcccggtgatatgagagtctgagataaggcaatgataagtgattgttgtgttggaaaggaaatgaagaaggtatagtggcacctgttaacagatttggtctaggttatgatgaagagagtttagcataattttttagtttctggcaaggattacttagtactataactagattaaggaatacgggaagtttggtttgggccatattgagtttgagatgctgccaagctaagacattgagatagaggtgtccagaattactcttggatacttatgttacttagataacaactacttgttgattgccaaatgtgctctaaacactgttctaatagtattaaacgcaggagaaagatctagaccagtcgttctcaactgggggcaattttgccccccaaagaatttttggyagtgtctggagacatttttggttgtcacagctgggtcaggggaggggtgggaagttactatgggtatctagtaggcgtagatgtcggagattttgctaaacatccacaagacagcaagcagtcmcctgcaatgaataattagtagtgccatggttgagaaactctgatctggcctgaggatacagatactaccttctggatcataagcgtgtgaatatcatggtcattccagatttctaacttctcattcccagtgatctgtattatagtagagactttatataaagactgtgtgaaatataatgttagctagatatttatttagttagttacttagctagctagttgagatgaggttttgctatgttgcccaagctagtcttgagctctgggcctccagccatcttcttgccttggcctcccaaaatgctcattttacaggtgtgagccaccacacctggcagtgagatctttttttttaaagctaagagtgttttataaataccagtatgtaaaagtagataaaggaagtagtatgttttagataacaagatcaactaaacaagtaattttaaaagtttagaacccagtgtttgtgagggcaagagggaactgggagacagaacagagaatagaatggaactgtgaacaaatgtcttgaggaaaaggtagagaagagacatagaggtctgctaagaatgatggctatgaaccccttcctgttcaaggattagaaagtagttgggcaccaaacatatgaaaaagagcactggtcattaaagaaatgcaaatcaaaaccgcaatgagataccatctcacgccagttagaatggcaatcattaaaaagttaggaaacaacaggtgctggagacgatttggagaaataggaacacttttacactgttggtgggagtgcaaattagttcaactgttgtggaagacagtgtagcgattcctcaaggatctagaactagaaatgccatttggcccagcaatcccattactgggtatatacccaaaggattataaatcattctactataaagatgcatgcacttgcatgtttactgcagcactattcacaatagcaaagacttggaactagctcaaatgcccatcratgatagactggttaaagaaaatgtggcacatatacaccatggaatactttgcagggacatggatgaagctggaaaccatcattctcagcaaactaacacaggaacagaaaaygaaacaccgcatgttctcactcgtaagcgggagttgaacaatgagaacatatgggcagaggggaggggaacatcacatgctggggcctgtcagggggtccggggtaaagggagggatatcattaggagaaataccgattgtagatgatgggttgatgggtgcaggaaaccaccatggcacgtggatacctaagtaacaaacctgcacgttctgcacatgtgtcccagaacttaagtataataaaaaataaataaatagaaaacagaacacaaaaaaagaaagaaaaaatatttgggcacgatgaggagaaaggggtatagtttaccctaaatttgggataaagctgtaaagggtttgggaggagaggagcatgtgtctttactatgatgacaaggcagggctctttgaggccgctgtgagtgtagttgattgagtcacgtagcgtttatagtgagattgcatagacttcttatttttgtgtgcgcgtgatagcgatttgtaagctactgccaaactagagatgagaggcaatagctttggcttagagacatagctctctaaatcctcagttggggtcagcagaggtggcagtcgtaggacgcagctgtaattttactctagttagtgtgcctgggccctggttgaaggctgctgctaggtagtttacacgtgttctccagacactcaatctttcagattgacagagtttcacagcgatgttcttcagtttatagtccactgttattttcaggctagcacatagtgtatggggtgataaccagggatgacttcaagtttaggaggccttatggactaggagaaccagttacatgtcagcgaaaattctggcacattgaaatatgggaaccggccagacacagtggctcacgcctgtaaccccagcactttgggaggctaaggtgggtgtatcacctgaggtcaggagtttgagaccagcctggccaacatggcgaaaccctgtctctactaaaaatacaaaaattaaccaggcatggtggcgtgtgccgtaatcccagctactggggggctgaggcaggagaatcgcttgaacctgggaggcggagggtgtagtgagccaagatcacgccattgcactgcagcctgggtgacaagagcgaaactccatctcaaaaaaagaaaaaattacaggccaaacttagaatcattcatcagttcctggcatatttgttctttaatgcaaataggttgcaaactttggatgctaattattataaaaataaatatgtatcataggtctaatggattattaatagaagtaggatgctgtgcaacactgatattttgaaattgactggaaagacagccgtctatccacaaggactaactggattgagtggttgtggtcaaggttgtgattattattatttatgaggtaatacatagggctgtggggtgttggtatggggatgaggggagtgactgctaatgtgtatatggtttctttttggggtgatgaaagtgtcctaaaattgattatggtgatggttgccaccactgtgaatataatgaaaaccattgactcttacccttcaaagggatgcattttatgtaggtgaattatgttgcaatagttgttttaaaaaattatattcgggctgggtgtgatgctcacacttgtaatcctagcactttgggaggctgaggcgggtggatcacctgaggtcaggagctcgagaccagcctggccaacgtggtgaaaccccatctctactaaaaatataaaaattagctgggtgtggtggcaggtgcctgtaatcccagatacttgggaggctgaggcaggagaatcgcttgaatctgggaggtggaggttgcagtgagccaatatcacgccattgcactccagcctgaacgacaaagcaagactttgtttccaaaaaaaaaaaaaaaaagagagagagaaaaggaaagctggatgaagagagatagccaagcccatgtctagggaaaagcattcttgactgagtgaacagaaagtacaaagcctcagaggagggagcatgcctaggtagccacccagacctggtgaggctggtgtgtggggcagcctccatggagaggagttagaacaaaactctgtctaataaataaaaataaaaaattatattcatagttccccaccctccaaaccaaacctaaacaaatcaaaacaatctgctcttgaaagaaatagttgataagccagacttcattaaaattaaaagcttttgctttgtgaaagaccctatcaagagaatgagatgatgatccatgtactgggagaaaatatttgtgaaagacgtgtctgataaagtattgttatccaaaatatgcagataattcttttttttttgagatggagtttcgctcttgttgcttaggctggagtgcagtggcgcgatctcagctcaccgcaacctctgcctcccgcattcaagcaattctcctgcctctgcctttcgagtagctgggattataggcatgcgccaccacacccggctaattttgtattttttagtagagatggggtttctctgcgttggtcatgctggtctcgaactcctgacctcaggtgatctgacctcctcggcctcccaaagtgctgggattacagacgtgagccaccatgcctggcctgcagataactcttaaaactcaataagaaaatgaacaatctgattaaaaaatggacaaaagttgctgtcagatcatgccagtttttcagaatggttgtgctaaattacactttcaccaccagtagaaactgtctagaagaagctggctgcaggagggctaagggatttattgggcctcagtgaagcttggtgatacgtgggtggctttgcagaaatgtttcctttgttggtgcattattacaaagattcaaatggggatttgctgcatttgtggtagctgtaggagctgaatattacttggagtcccagaataaagataaacatcactgaagataatacctggaagtatcatagtggtttcttaactaagatttcctcactgtagcctacttgcctggtttgtcccttaaagaatattagtaagatataataaagtaaatacagatatgccaaaaaaatggacaaaagacacctcatcaaagaagatacagtgatgacaaataagcgtatgaaaagatgctctaccttccgtgtcattagggaaatgcaaagtgaaacaaccatgagataaccactatatacctattagaatggccaaaatccagaacaccaacagtaccaaatgctgatgaagatgtggagcaacaggaactctcattcattgctggtgggaatgcaaaatggtacagccactttggaagacggtttggcagtttcttataaaactaaacaaactcttcatataatccagcagtcctgctccttgatatttaccsaaatgagttgtaaacttatgtccatacaaaaacctgtacatagatttttatagccactttattcataattgccaaaacttggaaggaaccaagatgtccttcactaggtggatggataaacaaactgtaatacacccagacaatgaaatattatgcagtgctaagaagaaatgagctatcaagccataaaaagacatggaagaaccttaaatacatattactaaatgaaagaaaccaacctgaaaaggctacatatatatgattccaactatatgacattttgggaaaggcaaaactatagagacagtaaaaagatcagtggttttcagaggttggagggaggtgaatttgaataggtgaaactattctgtatgatactataatggtaggtacatgtcattatacaattgtcaaaacttatagaatgtgcagtaggagtgaccctaatttaaacaaactatggcctttggatgataatgatatgtcagtgtatgctcatcatctgtaacaaacgtaccactcaagtgtgagatgttgatgcggggaggctgtggggaggggcagggggtatatgggaactctgcacttttttctttttttctttttctttttttccctttatatggagaacgargtctctctatattgctgagggcggtcttgaactcctgggctcaagsgatcctcctgtctttgcctccctaagtggtgggattacaggcgcgagccactgtgcccagcaggggaactctgtactttaagattttttttkttgtttgttttgagacagagtcttgctgtcaccccaggctggagtgcagtggcgccatctctgctcactgcaagttcggcctcccgggttcacgccattctcctgcctcagcctttcaagtagctgagactacaggcgcccgccaccacgcccggctaattttttgtatttttagtagagatggggtttcaytgtgttagccaggatggtctcactctcctgacctcgtgatccgcctgcctcgaccccccaaagtgctgggattacaggcgtgagccaccgcgcccggccgggaattctctgtacttttctgctcaattttgctgtgaagctaaaactgctctaaaaaatagtctatttacaggggtaaaaaaacacaataaaaaaatctactttccctggagttgtaactgtctcagtaatgattatttccagccttctaattgtttaagccagaaatcccgcgtcatccttgattctttactttctcttaacaccctgtatccagctggtcataaatctagcagatgctacattcagataacatctggaatctattttccctattttctacttctactaccctgtccaagccagttaacttttacctagattattatagaagacacttaactgatctccctgcttactcctttgtcccaattccaaccccagcccagccacccctccaccaccatcaatccattttctcttttcttgttattttgagaaagggtctcgctctgtgacccaggctggagtgcagtggcacagtctcacctcactgcagctttgacctcccgggctcaagcgatccttgcacctcagccttccaagtatctgggacttcaggcacatgccaccacgcccagctagtttttgtattttttgtagagactgggttttgccattgttgcccaggcaggtctcgaactcctgagctcaagtgatacgctcacctcggcctcccaaagtgctgggatgataggtgtgagccaccacgcctggccagtttgttttcaaaacagctgacttaatatcatgtcagtcttctgctctagaacttctaatggcttcccgttacactcagtagaagcccaggtccttattttcaccaccagtgacctaaataattctgtgatgctctcctgtttttcttctcattcagtttactctraacacaccagccttgatgatgtttcttagacacaagcatgcttcacatcaggacttttggtctttatttctctgcctgtagtattgtgtccccatagccttacctcctttagagttttgctcaaaattcactttatcagtaaggcttccatactctccctgtttaaaataacagcacctactctccaccccagcaccccatccctcttctagtgtgtctgtttgctctatacttccttgatatyactatgtgacaaattactrttatatattttacttatttattgtctgtctcattctattagaatgtaagccccttgagagcagagcttttagtctgttttggttgttgctatttactttgtatctagaacaatacctggtaacataccaggcactccataaatatttgttgcattgaacaactaaatattcaatataatgtagtggaaagtggtaggaaacttggattctagatctgttgctaagattaagtaacatcttttattatctaagtcaagtgagaaatttggtgtaggtaatttctttttttttttttttttttgagacggagtctcgctgtgtcgaccaggctggagtgcagtggtgcgatctctgctcactgcaagctccgcctcccgggttcatgccattctcctgcctcagcctccctagtagctgggactacaggcgcctgccaccatgccccgctaatttttttgtatttttttttagtagagacggggtttcactgtgttagccaggatggtctcgatctcctgacctcgtgatccacccgcctcggcctcccaaagtgctgggattacaggcgtgagccaccgcgcccggccggcgtaggtaatttctaatgcaaaccagaattttataattctgatggaaccttcgagaacatctttcagtataaagtttaaggctcaaagttcagaaacattgtttcactcaccagcatctattttttgcttttgtttttgtttttttttgaaacagagtctcactctgtcacccaggctggagtgcaatggcgtgatcttggctcactgcaaactctgctcctgggttcaagcaattctcctgcctcagcctcccaagtacaggattaccagcgccctgccaccacgcccagctaagtatttgtatttttagtagagatgaggtttcaccatgttggccaggctgatcttgaactcctgacctcaggtgatccacctgcctcggcctcccaaagtgctgggattacagatgtgagccacacacctggcctgtttttcttttttttagataggttctcactctgtcgcccagactggagtgcagtggcgcgatctcggcacactgcaacctctgcctccaaggctcaagcgattctcctgtctcaacctcccaagtagctgagattacaggtacgtgcctctactgaccagcttatttttgtattttttagtatagacagggttttgctatgttggctaggctggtctcgaactcctgacctcaaatgatccacctgcctgagcctcctaaagtgctggaattataggtgygagccaccacggctggcctgtttttgttattttttttaatgagtgatggatgtactatatggcaggaccatggattgatttgttgaagcatataggtgtggaaaattcaacacaaacaggagctagctacccagggactcaaggccagaaggattccaggccaaaaagaagatcttgcctttgaggtgctattttaagatcaggaacttaccctaggaatgaaggcaaatcattttattttgaagttttctgattttttgtataatgtttaggaaattaacaactctatttcccctcattgtcttttgggagcccttttttcccccctcccactcccattgagttctgttcttgctactgtgtagctattgttgtagctgtaactgttaaagtgtttctcatatattaatgagattatagcatttagaktccttaattaatgtttaagtgatttcattatgcttgttagtttaatttctcctttcttggcagacctatcgtaaaatccaataagcctttggcaatagtacaaactggtctcaggtaggaaggaaggttccacctgagacctccagttccctgtatatagcagggatgtatacttccttttccagaacgttggtgtgagaatcatatgctttctatgacattttttggtttgattactttcagtggacaaatatttttgaagtgcaaacatttagagttcctttaacaaaaagaatggcttggctgggtgcggtggctcacgcctgtaatcccagcactttgggaggccgaggcgggtggatcatgaggtcaggagagcgagaccatcctggccaacatggtgaaaccttgtctctactaaaaatccaaaaatgagctgggtatgatgactcatgcctgtaatcccagctactcgggaggctgaggcaggagaatggcttgaacctgggaggcagagattgcagtgagctgagattgcgccactgcactccagcctggcaacagagcgagattctgtctcaaaaaaataaaattaaaaaaggctcatcttttttgttgttgttgttgtttgtttgttttgagaaagagtctcaccctgtttcccaagctggagtgcagtggcgcgacctcggttttcggcaacctctgtctcctgggttcaagcgattctcttgcctcatcctcccgagtagctgggattacagctgtgcaccccacgcctggctactttttttttttttttttttttttttgagagggagtctctctgctgcccaggctggagtgcaatgggtgcaatctcggctcactgcaacctttgcctcccagattcaagtgattctcctgcctcagcctcagctgaggattacaggcacctgccaccacgcccagctaatttttgtatttttaatagagacggggtttcactacgttggccaggctggtcctgaactcctgaccttgtgatccacccacctcagcctcccaaagttctgggattacaggcgtgattcaccatgcccagcctaatttttatatttagtagagatagggggttttgccatgttggtcaggctggtcttgaactcctgacctcaaatgatccacccactttggcctcccaaaatgctgggattacaggcgagagccgccgtgcccagctggctcctcagttttagatttgaattttataattaattatagttagcctttttatttcaaaataacccagttttccccagtggtaacattttgtagaactatrgtgtaatgccacaaccaatacaacatcagccaacattgacactgatacaactcatgatctttaggtacaacccaagatcatcacctcatgatgttcagatttcttcagttttacttgtgtttgtgtgtgtgtgtgtgtgtttgtgtgtgtgtgtgtgtgtgtgtgtgtgtttgtgtgtattcagttctttgcagttttattgggtaagggctcatgtatccaactctatagtcaaaatacagaacaggtccatcatcacaagaattcctcatgttgcccttttatagccacacccacttccttcctgcaactgctggacccctgacaacaactaatccgttctccatttctttaattttgtcatttcaagaatgtgtaaacacggccgagtgcagtggctcaatgcctgtaatcccaccactttgggaggccgaagcgggcagatcacctgaggttgggagtttgagaccagcctgaccaacatggtgaaactactaagaatacaaaaattagctgggcatgatggtgtgtgcctgtaatcccaggtacttgtgagactgaggcaagggaatcacttgaactgggaggcagtttgcagtgaactgaaattgtgctactggactccagcctgggcaacagaccaagactctgtctcaaaaaaaaagggraaaaaagaaggttatataaatggaattatacagtatataaccttttgggacagttttctgttgtttcatttttttcactcaacataaatgccttgagatgaatccaggttgttgtgtggcagtattcgtttctttttattgctgagtagtaktacatggtgtggatgtaccaaaatgtgtttaaccattcactcattgaaggatatctgatttgtttttagttttgggctatgatgcattaggcttctgcgagtatttatatacagattttgaacatgtttttattgccaagactacagttgctgggtcaaatggtaagtgtgtggtttgcaatttattttttaaattaccagataaaaatcttttactggctgggcacggtggctgacgcctgtaatcccagcactttgggaggctgaggtgggtggatcacctgaggtcaggagttcaagaccagcctggccaacatggtaaaaccctgtgtctactaaaaatacaaaaattagccgggtgtggtggcacatgcctgtaaccccagctacttgggaggctgaggcaggaaaattgcttgaatctgggagatggaggtagaagtgagccgagatcgtgtcactgcatttcagcctgggagacagagtgagactccgtttaaaaaaaaaaaaaacaaaaaaacccaaaaaccttttactgttaaaattatttcttcatatatatatatatatatatatatatatatatatatatatatatgtgtgtgtgtgtgtgtatatgtgtgtgtgtgtttggtgaaaaacatcattttacagttcttgtaaagctgtctgtctcctagaaccttagtgtctctgtaggtagtttgcattgcattaagaattctgtgtgacagctgacagaaatccaacccccgaattatcacagggtactttcctatcaaaaagtatacttgggttttgtaagtattagacctggtatttttcttttttggtattttatctttagttttaatgttgtagtaaatgtttaccttttattttctctttttatagcggctatgtgactacgtttgtgacctcctcttagaagagtcaaatgttcagccagtatcaacaccagtaacagtgtgtggagatatccatggacaggtaaaatttcatgagcagatttttaagttttgtactgtccatgatccatgtgtgttttcacatgtgctgcaaaattaaaacaacaacaacatcaacaaacacaactggtggtaagctaggttgcctcagtctctgtgacacaaatgattcctggtttacatttttggtgaataaaagcagtggtcaaattagtgatggaatttgttgataattacatttgtgaagtgaataatgcagcattagttttctgtggaatggtggggttgggggtaggtagaagatataaagtacaaacacatactgctcataataactatgattaacaggagatgttttggtgttaggcacttttttcattcagttcatttctgttctcctgtcatatattgttgaaaatttatcatttctttagtgggaatgagaatagcaaaggtacagaaaaataaaattgttggtccatgatgtcacagcaaatcactgatgaatgagctagaaaatatttagctcaatttttcatctgctgggtgtttgtaagaatttcaaagcagtgccgggcgtggtggctcacacctgtagtcccagcactttgggtggctgaggcgggtggatcgtgaggtcaggagtttgagaccagcctgaccaacatggtgaaaccccgtctctactgaaaatacaaaaaaattagctgggcatggtggtgcgtgcctgtaatcccagctactcaggaggctgaggcaggagaatctcttgaacccgggaggtgaaggttgcagtgagccgagaccgcaccactgcactccagcctgggcaacagagcaagactctgtctaaaaaaaaaaaaaagaatttcaaagcagtaacaggaggggcatacctcatatttagattctgttgtcagtgtttagtctcatgtatatttgtagaattttttcactgggaaatgaaagctgaacagattactyatagagtgctatatgcatacagtgtagttggggccataagacttaataatacattgcaaacaatgtagtctttaaaggatgccaacaggacttactgtcacctgtgcaatttccctgctttaaatatgactgtgtaaatgagcagaaatgtgtgtaaattgactctgattaggggctgctccatgagtaaagtcttgttttggctacttacttacaggctgattttcttttggtttttcaaggtgttttctggattttttagattataaaaaaatctgacacttgcatgtcatcacctcctagatggaggtcccattatgtcatctttgattgttaaaattacagttctttagagtagactttaggaattgatttcctaaaatttccatgtaacttctctctcaaacatttgtattttgctaacataaaggatattaatataagcagtgtcttaagacattcctgaaaactggaataaaccaagtcatgttttcccccagtgtagtgtagaagtttctatgtaacttctctctcaaagtaaacatttgtattttgctaacataaaggatattaatataagcagtgtcttaacacattcctgaaaactggaataaaccaagtcatgttttcccccagtgtagtgtttcccccagttgtagastttttaagatgtgaagtacagccatgatcaaaggtcagaaagttagagaccaacctcgaactactaaaattggaagcataaaattgaacttttgtattatatataccttcagtcaaatgtgcagttcttgctaacatatatcttgtgttttgaggttaacaaagtactttttcacatattctgtgtcagttttttcccaaagtcctgtgagataggattattttgtagacaatgaaagggagactgaaagattgaagagaaatagcccaaactcacacacagctactacagggcagattgagatttgaaactaatttgggtttcttttgtacatgttattttaagaccaccaccaaaccgtgaacaattgtttatgttgtatgtgttccttaaaaaacaattgttccaggtgcagtggctcacgcctgtaatcccagcactttgggaggcygaggcaggcagatcagaaggtcaggagttcaagaccagcctagccaacatggtgaaaccctgtctctacgaaaaatacaaaaattagccaggtgtggtggtgcgtgcctgtaatcccagctacttgggaggctgaggcaggagaatcgctagaacccgggaggcagaggttgcagtgaaccgagatcatgcattgcaccccagcctgggcaatagagtgagactctgtctcgaaaaaataaaaaataaaaaataagccgggtgtggtggctcatgcctgtaatcccagcactttgggaggctgaggtgggtggatcacgagggcaagagatcgagaccatcctggcaaatatggtgaaaccccgtctctactaaaaatacaaaaattagccaggtgtggtgacaggcgcctgtaatcccagctccttaggaggctgaggcaggagaattgcttgaacctgggagacggaggttgtggtgagccgagatcgcgccattgcactccagcctgggcaacaagagcgaaactccgtctcaaaaaaatgaaaaacagaagattgctaatcagaaacatgggatttgagcctctaaatagctattgactgattaaatacaatgtaaaatgtatcctttgggacttatcttcctctggggcctgttctggaattgcaggattgggttatgagtatgaataaacatgttagcaagcatgttgtgctgagaagtattgaagctgtgtaatatagtgaggagttatagatttcagtgtcagatacaacttggtttaaatcctggcttggctatatattagttgtttaagaagccatttcagctagctcacaaattcgttaagtgtggcctgtggacccttgggtctctaaggtggtacagaggcaatggagggtaaaactrctcgtgccttagcatgaaccaagggaatgacactagaatatactgattatcattgagttcttcaccaacatgcctgcacagtaaaataaaatgccagtttcacttaactctcaatcctttagaatatccattatttgaaaagtctggctgggcatgatggctcatgcctataatcccagcactttgggaggctgaggtgggaggatcgcttgaagccatgggttcaagaccagcctgggcaaccaaatgatacccccccccccccccatctcaaactcctgacctcaggtgatccacctgccttggcctcccagagtgctgggattacaggcgtgagccactgcgtccggcctgagactccccatctctaaaaaaaaaaawttttttttttttgagacagagtttctctcttgttatccaggctggagtgcaatggcacgatcctggctcactgcaacctctgcctcccaggttcaagcgattctcctgcctcagcctcctgagtagctgagattacaggcatgtgccaccacgcctgactaactttttgtatttttagttgagatggggtttttccatgttgctgaggctggtcttgaacccctgacctcatgtgatcctcctgtctcctgtctcggcctcccaaagtgctgggattacaggcgtgagtcaccatgcccggccttttttttatttcttttttttttttttttttttggacagggtctcgctctgtcacccaagctggagtgcagtggtgtgatctcagttcattgcagcctctgcctcccgggttcaagtgattcttgtgcctcagcatcccgagtagctgggactacaggcacgcaccaccacgcctggctgatttttgtatttttagtagggatgggattttgccctgttggccaggctggtctcgaactcctggcctcttgtgatccacctgcctcagcctcccagagtgctgggactacaggtgtgagccgctgcacctggcccccatctctaaaaatattaaaaagaaaaaaattagccaggcttggtggtgtgagtctgtaagtcctagctcctcaagaggctaaggtggaagcattgcttgagcccaggagtttgaggctatagtcagctattattgtgccactgcactccagcctgggcagcagagtgagaccccatctaaaaagaaaaagaaaaaagtctgtgtgatgaaatgggaagtatgcataaagcatatctactgcatgctgaagaaagatagtttactcaaggaaaagtagttgtgggttgggcacggtggctcacacctgtaatcccagcaccagatcacctgaggtcgggagttcaagatcagcctggccaacatggcaaaaccccatctttactaaaaaatataaaaaattgccaggtgtggtggtgggtgcctgtaatcccagctactcagggactaaggcagggaaaattacttgaacctgggaggcggatgttgcagtaagctgagatctcaccattgcactccagcctgggtgacagagtgagactctgctaaaaaaaaaaaaaaaaagaaaaagaaaaatacttgtgaaattctttgagtcatgagttaaaataactgcttttttatggaacactatttttacttgrgaatgactgacaaactgtgattatttagacttgggtatttggcaactatatttgcaaaagtgaaggaagtgggccagtcacttcaaggagaacaattgacagtatttgttgccgatgacaaaatttgaatttactaatgaaaaattggaattttggaaaatctgagtccaccactatggggctaacagtttccgacacttaaaagactttcctgagatgaaatgagcagtgatattaacaaatatggttttttgatgatataaaatgcaatgtcattttcatttttcaaattactagtttaccatttactcaaagtgtaagataacaaatgtaacagggtatgaaagatgactattataggccaggcctggtgactcacacctgcaatcccagcactttgggaggccgtggcaagcggatcgcttgagcccaggagtttgagaccagcctgagcaacatggtgaaaccctgtctctactaaaaatacaaaaattagccaggtgtggaggtacgtgcctgtaatctcggctacttaggtggctgaggcatgagaattgcttgaacctgggaggtggaggttgcactgagctgagaatgtgccactgtactccagcctggacaacagggagagatcctgtctccaaaaaaaaaaaaaaaaaagcaaaagattactgttatggtttcagatttcatattgcgattaacttttaagtgtcataaactgccacttgtcaaattttggtacagtatttaaagagtatgcacagttacctgaaaatgttattaaaatactccttccttttgtaactgcatatctttgtgaagctggattttcttcatctgctttacttagtatattcccaacagactgagtgcagaggcaagttctaagactagccatgttctatttagccagacattgaagagatttgtgaaaatgtaaaacaatgtgaattctcctctcactaaacaatttttttgttttggaaaagttaatttttcattaaaatgtgtttgtgatactttttgatgggtatgttattgatttktttttttgagatggaatttcactcttgtcacccagactgcagtgcaatggtgtgatctcagctcactgcaacctctgcctcccgggttcaagcgattcttctgcctcagcctcccaagtagctgggattacaggtgtgagtcaccgtgcctggcctatgttattaatttttaaaaattcatttaaatatttaaaacttctgagttttaatctctaatatggtaaatattgatttgtaaaacttacataaaagattttcaggacctctggtttttaagatcacaaatgaatcctgaaaccaaaaagtttgagaactactgggcagactggatgtttccttgcctctgataaaaaaaaaaattccacttcctagccgggcgcggtggctcacgcctgtaatcccagcactgtgggaggccgaggcgggcggatcacgaggtcaagagatcaagaccatcctggccaatgtggtgaaaccccgtctctactaaaaatacaaaaattagctgggcatggtggcacatgactgtagtcccagctactcgggaggctgaggcaggagaatgacgtgaacctgggaggtggaggttgcagtgagccgagatcatgccactgcactccagtctgggtgacagagcgagactccgtctcaaaaaaaaatccacttcccaggctgggtaaagtggtacatatatgtagttccagctactcaggaggctgaggtgggaggattgcttgatcccaaaagtttgagaccaacctgggcaatatagtgagcctccatctcaaaaataatgataattaaagaaaaaaatctacttcttaagattgtttttggtttaaaatgggagcagagtatctgaaatatgaaaaacagagtagctgggtgcagtggctcacgcctgtaatcctagcactttgggaggctgaggcgggcagattacctgaggtgaggggtttaagaccaacctggccaatgtggcgaaaccctttctgtacaaaaaagtacaaaaattaggcaggtgtagtggcacgtgcctgtagtcccagctacttgggaggctgaggcaggaggattgcttgaacccaggagccagaggcagcagtgagctgagattgcaccactggactccaggctgggtaacagactgagactccgtctcaaaaaaaaaaaaaaaaaaaaaaaaaaagagagtgagggagagacatagagtagatggtagatattatttgacgatgaggtaggtgtctagtaatgtaggatgaaaatagggccgtgtgctgtggctcatgcctgtaatcctagcatttgggaaaccgaagcgggtggatcacctgaggtcaggagttcaggatctgcctggccaacatggtgaaaccccgtctttaataaaaatacaaaaatcagcgggggtgcggtggcagataagctactcgggaggctgaggcaggaaaatcacttgaacccaggaggtggaggttgcagtgagctgagatcgtgccattgcactccagcctggacaacaagaacgaaactccgtctcaaaaaaaaaaaaaaaagaattgcccaagttctcgggaaatgggaacctatgtatcactgacgcagaatatttaatcgtctacctgtgtgtctggtaaatacaaactttaaaagcttttgtttaagaacagatatctggccaggcgtagtggctcacgcctgtaatcccagcactttgagaggccgaggcgggcggatcacaaggtcaggagttcaggaccagcctgaccaacatggtgaaaccccgtctctgttaaaaatacataaattagctggggctgttggcacgcgcctgtaatcccagctactcgggaggctgaggcaggagaatcacttgaacctgggaggcggaggatgcagtgagccgagatcgcaccattgcattgcagcctgggcaacagagtgagactgtctcaaaaaaacaaaacaaaacaaaaaaacatatctgtaaacatcaatagaaaagtttaaggatactcactcttctaccatatttttattaaaaaactgacttacaaaactttttaatgttcacttcctgactttgtgtatataactactcaattttttacataatagaattgtgtagttataggtatagttttgtattccattcttttccctaatgatttttgcattttgctacatggttttcgtcataatttttattcatggcctcataaggtccttgagttgctagatcttaatttaagatattcacttatgttagtcatgaaggctgtttcttttgatgttttaaatgttgtcataacacttttttttttttgagacagagtcttgctgtgtcatccaggctggaatgcagtggcaccatcctggctcactgtaacctccgtctcccaggttcaagtgattctcctgcctcagcctcctgaggtagctgggactacaggtgcccgccgccacgcctggctaatttttgtatttttagtagagactgggtttcgccatgttggccaggctggtctcgaactcctgacctcaggtgatccacccgcctcggcctcccaaagtgctgggattacaggcgtgagcctctgtgcttggcccactttttttttttttttttgagacggagtcttgctctgtcacccaggctagagtgcagtggcgtgatcttggcttactgcatcctccacctctcaggttcaggtgattctcctgcctcagcctcccgagtagcagggattgattacaggtgcccaccatgatgcccagctaatttttgtatttttagtagagacagggtttcaccatgttggccagtctggtcttgatctcctgacctcatgatccacctgcctcagcctcccacaatgctgggattacaagtgtgagccactgtgcccggaccataacacttttttttttttttttttttttttttgagacagaatcttgctctgttgcccaggctggagtgcagtggcatgatcttggctcactgcaacctctacctcctgggctcaagcaattcttgtgcctcagcctcccaggtagctgggattacaggtgcaggccaccacccctggataatttttgtatttttagtagagatggggtttcaccacattggctaagctggtcttgaactcctgacctcaagtgatctgcctgcctgggactcccaaagtgctgggattacaggcgtgagctcccaaagttccaggattacaggtgtgagcagcttggcctgttagctaattttcagatacattttatattaagcttcctaaagttgtttttttttttttgtctgactttttagacttatggaacattgttataaaaggtgttactttatttctttcagtagttaacatctcactttcagttttcttcactttgactaacattcctattaagtgttaaaagtttaaatgataattttatttcaagtgtaaaagatgaatgtgttagaagttgttagttgtaattggtccaatgtattgtagtcaattcccttaatccaaaatcgtttttcttccagaaaaactgtaatgctttctttggaaattagggctagggtaataatctagtggactgaaatttgacaaatgcacaatttgccagttaccaaatttcagtaaatagaaatatgatgaaatatcmttgggtgtcatggatcacacttgtaatcccagcactttgggagactgaggtgggaggattgcctgaagccagtagtttgagaccagcttgggcaaaaaagcgagaccctgtctctataaaaatttgctgggcatggtggtgtgtaactgtggtcctagctactgaggagggcaaggtaggagggttacttgagcccaggaatttgtggctgcagtgagttatgattgcaccactgcattccggcctgggtaacagagccaaaccctgtcttaaaacaaaaaacaaaaaatatgatgaaatatataatttttttttaactgatcattgaggagacactccatggctgtggagcctgagggtatataactctaactgtagaatgtgggaagatctctgtataacactggagtgtcatgtaagttcagtttggaagaaaaagaggtatccacttgtttctgtaatcttttgtctcattaaaatagatacagaatttgggtgggctgttagattagcttactgagaaattagacaattgataaaggatgtcagaattctcaagagatagatggggagatgtatgaaagaaaatgagaaagggaatcctatgataataatctaggagtgactttatggtaactgagctttatttagtgctttttttagtcttgagaactgtgtgcttggcagtttggcttacactttatttcttaaaaatgtaaatatttggagtcctcttagctgcttctttacacatttcactctcagttttgttgctttgcttcttaacaggaatttgtaatcagcatgtattgcatttcttttatagttttatgacctttgtgaactgttcagaactggaggtcaggttcctgacacaaactacatatttatggtatgtaaacaccagtgatatcaagtgcttgtttaaaatggaaaggatctgacttattaaatgtaaattgcataataattctttaccatgtgacagtccctatttmrgtatattaaaagatgtgtattagtccgttttcacgccgctgataaagacatacctgagactgggcaatttacaaaagaggtttaatggacttaacagtttcacatggctggagaggcctcacaatcatgcagaaggcaaggaggaccaagtcacatcttatgtggatggcggcaggcaaagagagagagactgtgcagggatctcttgtttttaaaaccatcagatctcatgagacttattgtcatgagaacagcacaggaaagacttgcccccatgattcaattactttccatcgagtccctcccacaacatgtgggaattcaagatgagatttgggtggggacacagccaaaccatatcaaggtgattgtatacttttctacatttaactatgtcctctaattaattgccttagtaagccactgtagatagggttgggttgtagctgtcagtaatggttgggcataaaaaataacccagaacccctggtttaaggcaaaaatcttcaattgactattatttattcagacttttcgagcattcatttttatctctcgttaatctatggatggattaatatacacacatacacatttgctatagatgtttgcttttcttttggaatgtaatgttactgttgaactttttctggatccttctctcattttctttccttctgaaagtttctgggtcactttcttattttttttttttgagacggagtctctctctgttgccaggctggagtgcagtggtgcgattggcttactgcaacctctgcctcttgggttcaagtgattctcttgcctcagcctcccgagtagctggtattacaggcgtgcgccaccacgcccagctaatttttgtatttttagtagagacaggatttcactatgttggccaggatggtctggatctcttgaactcgtgatccgcccacctcggcccctgccttggcctcccaaagtgctgggattacaggggtgagccaccacgccggccactttcctattctttcagctgttttcctattggtgtaatattggcccaagtcagacattaatgggaagtgtaaatagtatattatcatatatggttgttaaatgcaaaactgagcctagaacgctgttataattatggtatttgcttttacaaaaaatttttttcttcaagtaggcaactcttccaatacagttaaaatgattcttaaaataaaaaattattttacctgggcatggtggtacatgcctgtagtcccagctacttgggaggctgaggtgggatgattgtttaagctcaggagttctagaccaacctgggcaacatagtgagaccccatctctaaaaaaaaaaaaaaattgaatttttaaaaattaaattacttggccgggcgcagtggctcacgcctgtaatcccagcactttgggaggccgaggcaggtggatcacctgaggtcaggagtttgagaccagcctgaccaacatggagaaaccccgtctctactaaaaaaaaaaaaaaaatacaaaattagccgggcttggtggtgcatgcctgtaatcccagctactcaggaagctgaggtgggagaatcacttgaatccaggaaggggaggttgcagtgagccaagatcacgccattgcactccagcctgggcaacaagagtgaaactccatctaaaaaaaaaaaaaaaaaaaacttaaaaaatactggttagcagatgaccaaatcaactaatgtaggtaatagaggattgaaaaaatggtggttttgccaggtgtggtggctcacatctataatcccagcactttgggaggccaacgtgggtggatcacaaggtcaggagtttgagaccagcctgaccaacctggtgaaacccccgtctctacaaaaaatacaaaaatcagccgggtgtggtggcggcttgtacctgtaatcccagctactcaggagtctgaggcaagagaatcgcttgaacccgggaggcggaggttgcagtgaaccgagattgtgccactgcactccagcctgggtgacagagtgatactgtctcaaaaaaagaaaaaaaagaaaaaaaaatggtggttttttttttcagggaaagtttttgagagaatggcacagcagattcttgtagatttccctggaatcaaaaatcttgtttgtataaacatttaatagaaaaaatttgtttacgtgtattttatttttttgttaaaatcaaatttccaaataattcagtatgtaactctttattgtagttataaactatatgtttgtacagtttgatataatttgaaaagaatattgtggctattgtattgtttgtaactgtaaacttttacttcacagggtgattttgtagacagaggttactatagtttggagaccttcacttaccttcttgcattaaaggctaaatggcctgatcgtattacacttttgcgaggaaatcatgagagtagacagataacacaggtctatggattttatggtaagaattcctatttctctgattctgaatattattttactttcctctttggaaaacaaagctacacaagtcatacacatgctttatgtatattattttccccacatcctcactccttcactcctcccaaacaattgaaaatcttatgctcgagagaagaccactgttaactttttggtgtgcatctttctagatctgtgcctcaaagtgtagctggaatcacctgggttctcattaaaaatgtagattgccggccgggtggggtggctcacacctgtaatctcagcactttgggaggctgaggcaggcggatcacaagatcaggagatcgagaccatcctgaccaatatggtgaaaccccktctcttctaaaaatacaaaaatgagctgagcgtggtggtgtgtgcatgtaatcccagttactcgggaggctgaggcaggagaattgcttgaaccaaggagtcagagtttgtggtgagccgagatcatgccacagcactccagcctggcgacatagggagactccgtctcaaaaaaaaaaaaaaccaaaaaaaaaaggagaatgctgggcctcaccacagatttattaatcaaaatattttggagtgggaatctagaatctgctgaaggtgaatgttctgcacaaatttgagagtccattctcatccattttgtatgtgtgtgtgtgtgtttatgtgtgtttatatatgtacaaacacgtgcacactaaaatggggacatacctgattttttcactttattaatgttattttcatggctgcttcatataccatatggatgtagcataattgatgtatcagtttttcctctatcgttggactttagagttgtttttaagctgctgttatacatccttttacatatatctctgtatgctcactccagagaatgctaggacctcagggatcagaagcagaacttagtcataaacagcaaaataggccaggcgcagtggctcacccctgtaatcccagcactttgggaggccgaggcgggcggatcacctgaggtcaggagttcgagaccagcctggccaactaaaccctgtctctactaaaaatacaaaaattagccgggcactggtagggggaggggggagggatagcgttaggagacatacctaatgtaaatgacgagttaatgggtgcagcacaccaacatgacacatgtatacatatgtaaaagaccgacacgttgtgcacatgtaccctagaacttaaagtttaataataaaaaaaatttagccgggcatggtggtgggggcctgtaatcccagctactcaggagactgaggcagggagaattgattgaacccaggaggtggaggttgcagtgagccaagatcgctccattccactccagcctgggcaactgagccagactctgtctcaagaaaggaaaaaaagcaaactagctaattctttaaaacttttatttggttgaaagagagagagagagagagagagagagagagagcgagcttattaggaagccccttcagggaaatagaactgtcaagattatgaatttggattttccttgagcacaattaagacagatattgagagatttggaaacattaattgcagaaccctttagatttaaattttatattttgaattatcttctttcattataaagataggctgggccaggtgtggtggctcatgcctgtaatcccagtactttgggaggctgaggcaggcagatcacaaggtcaggagatcgagaccatcttggccaacatggtgaaaccccgtctctacttaaaatacaaaaattagctgggcatggtggcacttgcctgtagtcccagctattcgggaggctgaggcaggagaatcccttgaacccgggaggtggaggttgcagtgagccgagattgcaccattgcactccagcctggatgacagtgaggctgtctcaaaacgaaacaaagcaaagataatctgaactctcttactcttcagtttgtctgccattatcaattagagaaattttgagaatttattgtttttatataatttttttaatacgtgtaaagttaggtaatatttatctcctttctacaggtgactttttattttcattcacaaaataaacaccaattgaaatacaacttttggattcttttgcaaaataatcaatattttggataacatactatgatattagctcagtgaaaacagtactaaaactaatgttataaaaacacacacacctactatatatatgtaactaatgctacatgtataatatataaaatacatattgttatatatggctaatatatgacttttttttttttttttttttgagacggagtctcgctctgtcacccaggctggagtgcagtggtgcgatcttcgctcactgcaagctctgcctactgggttcacgccattctcctgcctccgcctcccaagtwgctgggactacaggcgcccgccaccatgcccggctaatttttttgtattttttagtagagacagggtttcaccgtgttagccaggatggtctcaatctcctgaccttgtgatccgcccgcctcggcctcccaaagtgctgggattacaggcatgaggcactgcgtccagccatatgacatatgttttgaataagataattttagttattataggacttatattgattttcaaggaataaaatatccctatatgactttacactgggacttcagttcacactgataaacacatactgggcagttactattgagccaagttcaagatccctgcctgcaacctgagctcattgttagggctctcttatggcaagtttacataacaatcttgcttcacgtagatatataattgagaaaatcttggggattggtcataacctgcagacttctttcctatatcattttcagcttcacttaaggcaatagtgatatgtcaggtttttttttttctaaaattatggaagaagccaaagtacagagcttccatggtgttaacaaaagaagtgtgtaccctattaactatgtagacagtcagggtacagtggctcacatctgtattctcagcactgtgggaggctgaggtaggaggattgcttgagctcaggagttcaagaccagcctggacaacatagggagatccccatctctaccagaaataaaattagccaggtgtggtggcacttgcctgtagttccagctgttcagaaggctgaggtggtgggatcgcttgaacccaagtggttgaggttgcagtgagctgtgatcgcgccactgctgattgtgccactgtattccaacttgggcaatagagtgagaccttgtctcaaaaacaaaaaactacgtaggcagcagaaagagtgttcaactgagaatttgtaagaacctgattggcaatctgtcctcagttttgatccactgaagctcaagtgtttagtcgcacgatttgcagaaaatctcagaagagacaacttagccctgagaagagttaggaattgctcatgctcctataactaaggatcctctaatttgtttgatctgtttatcctgctagaattgtctccttaaataaatttatctgcttaccagaattgcctaatattaacataactgttaaaacatttgcttcaggttgtgtgaaattagtatttaactcttctaatgatagcattttggctaataatttcagctgcttcttaggtccattccaggaatgaagagcagtactacatccttaggaaatacagtcatgtgccacataatgacatttcagtcgatgatggactgtatatatgacagtggtcccatagataaaacggagctgaaaaattcctattgcacaaatacttaccattgtgttactatttccttatgatatttagtacagttacatgctgcacaaatttatagcctatgagcaataggctatatcatattgcctaggtgtgtagtaggctagaccatctaggtttatgtaaggacatccgatgatgttcacacaacgatgaaatcacctaacaatgcattttttagaatgtatccccatggttaagggacatayaactgtatgtagttagtcactagcgttcttttggctctatgtggaggtcctagcaggactaaatatgtgtcatatcttgctatcctagtttaagctgaatttctgttgtactgaaggctgctctagtattggatatattgtttatttttattagcagattcattaattaaaacccttctgtttctttcacagatgagtgccaaaccaaatatggaaatgctaatgcctggagatactgtaccaaagtttttgacatgctcacagtagcagctgtaagtttctatttttaaagtctcatgtacgttcctgccaataacacattgcatatttttatctagttgtcatctcaattatattgatakctttagtattcactgatgagtttagatatgcctgaggttatatgttcaactctttgttatccttttttgctagttaatagatgagcagattttgtgtgtccatggtggtttatctcctgatatcaaaacactggatcaaattcgaacyatcgaacggaatcaggaaattcctcataaaggagcattttgtgatctggtttggtcagatcctgaagatgtggatacctgggctatcagtccccgaggagcaggttggctttttggagcaaaggtcacaaatgaggtaaagccaacatttttggaaatgtaatttgtggattgctaatgggctgcatagagaactatggtggccctagataacaaacttgtagtctagcttactcaaaatatggtggctgtggatattaaatttctagtttagttattaacgtatgtctttctttaatggttaaataagatgacacagtgaaagcacctactccagcatccatttggtaataatgtataaagtaaatgttctttccttttttttttgtttttgagatggagtcttgctctgtcgcctaggctggagtgcagtggcgtgatcttggctcactgcaacaacctctgcctcccaggttcaagccattctcctgcctcagcctcctgagtagctgggaccacaggtgtgcgccaccatgcctggctaatttttgtattcttagtagagatgggatttcaccgtgttggctaggctggtcttgaactcctgacctcaggtgatccacccgcctcagcctcccaaagtgctgggattataggtrtgagccaccgcacccggccagcccctttcctttcaagtactgtagttaagtaacaaaatggcaagaccaagataggcaatacttttttttttttttctcaaagacctcaaatcacacagatacagacactttattagtttcctctacaagagacaataacatgaatctttttttttttgagacaagagtttcgctcatgttgcccaggctggagtacaatggtgcaatctcggctcactgcaacctctgcctcctggattcaagcgattctcctgtctcagcctcccgagtagctgggattacaggtgtacaccaccacgcctggctaattttgtatttttagtagagacggggtttcaccatgttggtgaggctggtcttgaactcctgacctcaggtcatctgcccaccttggtctcccaargtgctgggattacaggcgtgagccaccgcgcccagcctacgtcaaatcttttttttctttttaacagaaatctctgttcatttgaaaagccaaatagatccaaagaaagaagatgaaaattaaatacttaaattaatcaaaaggcactatgataccacctaaaacctactgccacagtggtagtaggctaaggaagatcaagctacagcaaatcatgtaatgtgaatgttagcgattacatagcaggaagcacatttgctttccagaagactacggtacagtgttcatttgggcccaagaggatctttggccaggaaaggatcaagatggatgaaggtaaagccaaatcaaaggagtaggtacaaaagagaatccaagctacatagtcaagcagatgatgatggatcaggcttcttcctcccaagaaacatttgctgcgctgtgctgcctcccccctcaaccaccccccaccccctaccccatggctgctcaagcccaactgcctactcctgccttacagggtgctcagccaccgggactaggtttggggttgcccagggctcttgccataatttagcatagaccttggggagaactgctcacacatgggttggctttgctgctggttgttctcaacaaagaaaaccctgaagcattcacatgcagagtagtctgagcttctccagtcacagtcaaacacccccacacaacatcctcaaaagtctgaaatcttgtaacagctgagctatagttaaagctgcaaggctcacagaatcatcaaggaagccagaatgagacaatgcagataggaagtcccagcagttaatctcaatccttctttcttcatttcggataagctcagatatacctgatgtgggatatasmaagctacwstggagcaagctgggtcttctgctgaattcgtcatcaaataccaagggaaaacaaggggtggggtggattttattcttaaaaagcctcagaagttactgtattataaagggacatgactgaataggtaagaaacrgattcttcattgtgaattttcctgatggcttctgcaaggctcatagagatgttgatcacctgtattttggaayggtgcttcatcttgtcctcctggggtatgttattggtgactactactgctttaaagcatgcgttgttgatgtgagaaatagctggaccagagaagattctgtgagtcaagatagcataaactttggtgactccagctgagagaagtttgtcagctgcatggcagattgtgccacaagtgtcaaccatgtcatccgcaaggatggccaccagatccttcacatctcccacaagcaccatgcggtcgacttcattggccttctttgtgaatcaaggcaaagtccacattcagcctgtctgcaatggaggtcactctcttagctccaccagcatcagatgaaacaatagtgcagttcttctgctcagagatattctcccttatccacttcaggacacctggctctgcatacagatagtccactgggttatcaaaaaagccctgaatttgagaagcatgtaggtccatggtgataatatgatctgcgcctgccacagatagcatgtttgcaacaagcttggctgagattgtcacctgactctttattatcctgctgggcataagggaagcatgggatgactgcagtaagctggctcgctgaagcagtcttgcaggtattagtcatgatcaaaggcaccattaaattgtcattgattttgccacaaccactctgaatgatgtagacatcctttccacgtacacttttgccaatttccacacaggtctcctagttgctgaatttctcaatcactgccttgccgagctccaggcccaggcgatcggcagttttytgagataagccctggtgggagctgccgctgaagattttgatattcaggatcctggccaactaccctaagcactcttcactaagtgatcactgctgctgcagagactgcaaccaaagtcggcccagagactcaatactaatctctttgcgatgctactccgccatcttcaagataggcagtactttgaactttcaactgttttcagttaaaacacacacacacactttgaactttcaactgttttcaattaaaacacacacacacwcacacacacaccccttatattgggaagtgctccagcatcataatgaagtcaaaaaactagattctgatcctgcatcagtgtatcttaatttagataagttatttatctagtctgagcttttgtttccttaagttgcaaaagaataatctctttcagaattattgcaacatctacatatactaaaccttcagtaaatggtagatactgatagcaatatctttattattaaatcagaaaacacaaaattttgtttcatagtacctattgaatgctttttcttccagaaatttctaactgtttatgtagctgtacagtttccatagttgtgcacttgactcaggccaaaattgctgtttgcctaaacttattaaattgttggagataattatagagtgygttctataatcttgatgcctttagtagtaataggatttggtattttatttaaatgattatgtaggccgattgttttttaagtgctaagtacttacagtgcctttctaaattgcagtttgttcatatcaacaacttaaaactcatctgcagagcacatcaactagtgcacgaaggctataaatttatgtttgatgagaagctggtgacagtatggtctgctcctaattactgctatcgttgtggaaatattgcttcgatcatggtcttcaaagatgtaaatacaagagaaccaaagttattccgggcrgttccagattcagaacgtgttattcctcccagaacgacaacgccatatttcctttgaggccttcgcccatcctgctgacccatttttctgccctcttcttaccccaattttcttgtattaccctctacaatatactttttattgagcactttgctgctgaaatgctgcctcttgcctttttttttttaaattttaaattatctaaatttattgtttgttgtggtgtctatagcaaagtttttctatcaattttcccccatcccatccccaccctggactcatttgagaagacttgagaaatgtcttaatactcacactgctgcatgtagctcttgcttatttactggtctgggaaacaggatgtgtttcctttttttaaaagccaattgacagattacacctaaatactcctccttttgtatcattcagccttttgttttagtttggtaagttttaagaaatttcagcagcaaagttgttattcagtgggcacgatggactccaaatgcctcaagttatgtatacctgtcccagatgtaaacttcattgtcctttgttggatgatattttaaatggatataaaataaattggtctaaagggctgccctccttgttgtgtttttaaattttagttaaaaactgctacagcttatgactttgtactttaagataattgtattgatcttttttcagattccttgtattttttaataaagtaatcttaaataaaactcagataggttaagtgttagaaattttaaacagcttacattgttagcgtaaagttatcttttcttttttcctaatcagagttcttgaccctttggttattgagtttaaaacttcaattgaaattcaatagtatttatttttkaaaaaaatcactaaactgtgcctaaagaacataactgccatattaatgttttggtttatatcctctatagtaatagaaaaacatttaatacttgtaatgctgatgtgttaatttgataccagttgagtagaatgtgatcaatccagtttacaatctatcatgagtattattaactaaaatctatgtgcttttcaataggaatcattcttctcttgctgtaacacttgaccttaacttttagaaagtgttcatttttaaactgcaactggaaaggttgaaaagttaggactcttgtatttgtgaactgtaatctgaagcagattatttaaagtgtagaaaaagaaacaagttcttcttttttgcaaaggtctgtgataccatatttcagctttgtgtaagtaatttgaatatccaaagggttgtgatgatcagttctgaatatgcaactgtccacttaataaggacaagtattccagtatctcttatgactgtagtcataaatgatgttggaatgtacattttgtgaaatagttggtatccctttactatgattaatttttgttattccaggaaatacttgtgaagccagccaattaataaagcactttagcatctgttcaggtagttttgaaaaccmacttttccccttcaggataagaacttccaggttacctaaaaatgcaataaaaatctttatagtctaagcttcttggcatataatttttcatcagggttttcttttattaattgagcacaatactgttttgatttaatttttttccctcaaaccacccagctccttacatagtttttaattatatagctatmtgaaagaggtggctaagacatttgctgcacacacttgaactaatgttgggtcagtagcttcgtgttactgccctgatcccagtgtaattcaggtggaaaggtatttttatctcacagggatatgtagctatgtattttactaattgtgaaacactggaaattaatgatgcagacaacttggtgtggtctttgaacagctctctgcagtatttttttttttcctgttaccataaattgtatttaagtgcttgctttccacttaagttgtactaatagaaccggtaactcccagccctccctgtttgacactccttagcttagattgatgtagttgtttttgttatccctataatgtgacttttatttttaagtcattgtgtactgcatttgtttgtcactagttgggcacgtgccaataatattctctccattccttatctgccatctctgttttgcctgatttctcttcaactgaataatggctttttgcatggaaaaaatagtttttactattagacgtgtaaagggaagagagagctaatgtattggactttgtgagcctacaaggaatattttggatccctccaataaataagggctatgtactatatgtactatatagagttatcatgtggtggaagatacttgcaagtcatagatttatgggcaggaggatttgttactscctatatctaggctgaatgtaaaatcccttatgttgtatcaatgggggtaaaaactatttttatttgcctatgatatacttggtttctaataaagtgccctaggctctagtgagaactgtctactttgaattgccatttactccctttcctcctttggccgatatgctcttggctagctttttataagttaatgtgtttccccaaaaagtttcactactttatattcatttgagtgtgatcctaaaacacctggatcaacagtacatctcatatgcaatctgcatcagctcctattctgtctggatgtctagaactgttggaagattttgacgtcttaagccctaggttttgctttgggaaataaggtttgaaatattgttcattgcattaagatttgtgtgtgtgtgctttgtaagcccagaaccaggttttggaaaatgcctgtactgtgaaagcaaattaggactctttctgagcctctttcattgtcagaaatagaatcactttccatcagcttccaggaaattgtgtrtctggagtcgaagagatttracatcaagaatccagatttttaaatgtaattgttttttaaatgctaatgtttgtaaagcaccttcagttcttcggatgaaaggtgctatattccctcagtgtaaattaataaaaagrttacaggaagtttgtcaaaaaattcaatgcatagtctgtagtatgtcctgacaagaagttagcattttatataagaaattaaaaaatgcttattcctccacttggttgcttgactggtgaacaaaagtgaaacctttttttttttgttttgcatttgactctgagctaagtgttccaactctttaaaggcaatgtttattgttacaacctcgatccagtgcccagaactatgcttcrtgagatcatcacaactctttaaattgtatatttacagtgtgtagtgatgctgacgaaatacacggtagtaaaccaaaaagaaacatttggaaagtcccctagcatgatgccagacacactagatgcttggggaaggttggttctgcattcccctcctgttttctatttccgtatcaatttattggtgaatttgtgccctcatgagagtaggcttatgctggcttagatcattcaaatgttttcttaattcaaaaatgcatgacatttatagatttgtgttgtcaacaaaaatactacataagtatattccactcaatccctaggcacccactatgctcagcagcactgtgcttttgtatataaatggtgggttataaaagactgcatggaggcattatggaatagcacaggctttgggatcagatctgggtgaaaaccccagctctgtcatgcagtaatagcaactaacctgtatacagcatatgtgctaaattgttatgttctctattttgtgatgcccttgctgtatgggtctatgactatattaccttttattttttttttttcttggtagagatggggtctccctatgttgcccgggctagtcttgaactcccggctgaagagatcctcctatctcggccttccaaagcactgggattacaagcataagctactgtgcccagcccaaacttcaaaaaaattaataaatcttgttcatccttctctagaacttttctccccctagatgaggaaataggcttagagaggataggtgacttgtctaacgttgcacaagagagctggaacttgaatccctagagggcacaccagagtatttctttagcgctctattttaagcaatattggttattgtagttgtgtgaccctgaacagattgaattttctgaatcttaagtttctgtgtctaaaataagagaatatcaggcagggttaatctcactattaaaaatagcacacacaaagcacccagtatctggtccaaagctgccttttattaagggctcatactcataggccatttgttcaaattcattgtagttgggaagaataatccaaggcaatgtataattgctaacatagtgtagattttgtaagtacaacacatctggacaaggaaatgtttgatgtaggatggagtaattggggaagataaagaggaagtgtgaattaagtgtggactggaatgatgggatttgtatgtcttacagagttaaaataagcagagatcacttggacacaatgtgaagactcgaggatcctttttgggaaggcgtaagaaatgaataggtcctgttttattgacaatatctgccatatatcagtgaggattggtcaattatggaagatgctaaaaagcaggcaatggatttttaataaggaatataataaatgtatttcaagattacttccctagtgagttgatgatcccccttcgtctgacacaaattattctcgagttctttcctctctctggcttgataatatgggtggaaactgttagttgagattgaggtgatttgtggttctgtgactttaggattacgtgaaatactaatttgggggaccaacagagatttgacattttttcaaagcaatttttcaattcctactacaatttaccgtcagtattacttcataaatggaaagtcattttaccattaaagatgtaggtaggaccatctcagaagaaaagacaactctttacaccaaatacatttggttttgtgaaaaactagtatcctaatttttgccgcttatggagatcaatgagagattttccccaccccaatgttgacatgtactactcgacgctgtcatattattgaggcataaaagatgttctaataaaatggaagtgacttaagagaaagttttatgcctcctcccaactctgaacagatgctgagaatataccaaacaagttcacacaggagtagagatttagagaggccttcccaccttcaagaattttataatacgttaatgagctgagtcttattttcaaggatggctttgttaaagcagaagaagggtaactatgcttatgaaaggcagttttgcatgcctgtttgtcaaaaaatacagtacaatttattttaaaattgattaattggtgtagaacttgcaatggtcacacaatcaggatggtcagcttccattcagggatcaaatttgtccaggcctttcaaaatggaacacgttgcttttagtatggcattggttctgtttgtagtgctgatttttctttcatggtaattaaaaaaaaatcttactttcttaaaagcctgcacccaagctagtgagcttttctgcagaggattgagcatccaaaccatgctttattttggtggattcttagagttttctggctgggtcctttttgaggggtagctgtgagctgtgagacaatttcagcaagatgtagggacaaggatcgcattcgaggtggcttaaaaggaaacacgtttgtgagagttgcctcactgtctcacctgctagaagaaattgggagatttcagggcttgttttcggtcctggcgtggtgcagaggtggaggggcgccagcaggtgtgtggtatgcaggacgcagagccaggagaacctggggcaggtgtctggagccgggggtgcagttcctacttttagacgcatggtggcgctagggtctcctccggccctgctagcaatctctaaggcacctccgccgccacctgcagtctcaaccaaacctctgggtgggcagcgcgggatgtgacgggccgagcgtccaatcgactgacagatttccgtccacactactgctctagccaatgggagccgaggagaggcgcggaggaggcgggccccgcggcaagcctggcagaggcgcgaggccctcctcccgcctctccgcctactccagcctccgccgcctcagcttcccgagcgagccctgcggccgccggagcagctcccgcggcggagcaggagccggatggtcagaggagcccggcagccccagcagccgcggagtcgcctggcccccaggtgcgggggctgggtggaggccggggttggggatggggtgggggccagggagcgggcccaggggcagcggctcggggcggtggagcattcggggcgcagagaccggaggggcggggggtgcaggctggggggaccttgggggcgcctgcaggcggcggcgcgggctgggcgcgatcgcctcctcgaggccaggtgagaggggcgtgtgagggaaggggcgccgaggggtgaggctggcggcgcggggccgggaggggcaaggcgggcgcgcccccggaggggccgtggaatgcgggggtcgccgggcccggagaggcggggcgtggagggggcagtgcacggtcgggaacgggtgggcacaggaaaggggaggctaggggggcttgcgggggtgacgaggcagacaatgagtaggtggaggtgggtgattttggggagctgggctgtgacgagcaggggtcgaggatggggtgagggaccaggaaggtttgagctcagggggaattgggggaacggtgagtcccaggaatgctaggtcttggtaaataggggaaacagggcatgaggcgtttgtaaggtcagatctgggcttggcgagcctgtggtcccagagggtggtctatttagttcttgactggcacggtagcgccgggagatgttttcttgtatgttacttttagttaccgtcttatttgtttggtctgcagactgactggcacagtggagaaaccgcctcgaaaacggagaagcaggtaaggcagtgccttcctattttgcttcatgtttttctttttgcttggctgcacctgtgccgtactgcataattgtatactgtcagtagatgaagtttcttatttatcccccttttaaaagaatataaccacatgcatgatttttcttttgaggacttcaaattactacctctacagtcgattttttttttcttggtatctaagataatgtgggaaatcttgagaaatcctacttttttactttttgatgttgtgtaaggatctcagctatttttttttttaaccttagccataatttcattttctccagcatctctgtttaaaaagctcatcttggctggggtggctcatgccttcaatcccagctctttgggaggctgaggcaggaggatcatttgagcctgggagttcaagaccagtctgggcaacagagcaagactccgtctctacaaaaaattgaaaaactagccggtcccataaatatatacacctactatgtacccacaaaaacaaaaaattaaaaaaacaaaaaccaactagctgagcgggtgttgtggacctgtagtcccagcttctcaagaggctgaggtgggaggattgcttgagcccaggaagtcaaggctgcagtgatgcagtgagcygtgatcatgccactgcactccagtgtggggaacacagcaagaccctgcctcaaaaaataaactaattttattgagcatctactatgtgccaagtactgtgtacgaatgctctatgtgtatcttctcctgtaatcctcaaagaaccctaagagaatatgtagtgtcactattttacagaagagggaactgcgacacagagaggccaaatatttacccaaaatcatgcatctagtaaaagataaaaccaggatttgaatccagacagtctgactccagagcttaagctcttaactgttataccataatgctgctaataaatatgcaattgaaagtaggttttcttattgctttatcttttgtcgttggacactgtgtagttaactcgaatggttgaaccttaggaaaatagaagcaaagagtttaagtagtccacaaacaaagtgaattagtccttgagtaatggagatgaagatatatttatcacataaacatttttgactgcattccatgtgagaggtactacatagcaattctgtgtagtcattagatgattcctttttcacagatgttggcattgacctagagaaagtaagctactgtagttatgtgaccagtaggactactttcatagttaatatctggcaagttaatgatgttaatacacagaaaacctcaatagtaaatagacacgaaatgctgatggtggaagtgccaacagagtttccttgtcacactttaggcctgtactgtccaatccagtaaccatatgcagggtgagcactcaaaatgcatctagcatgactgaggaactaaatttttaattttatttaattgtaattaaattaacttgagaaactgctacttgatcagctattggaaaacgttcaagtatgttttgaacaacttgggtatgtgagtctgtatttttcatccgtcattttatgaaatctaagtatatatcaaatatttccaatgagaatttagggtctgaaatgagataagtataaaatacatgctagatttcaagttagtacaaaaattgaataaataaaatttctcagtaactttttatattgatgacatagtgagacaatattttaggtatattggagtaaatacttttttttttttttgagacagggtctggctctgtcatccaggctgtagtgcagtggtgcaatctcagcatactgcaacctccacctcctgggctcaagccacccagccaattcagcctctggagtagctgggactacaagcgcctgacacctcacccagctcttttttttttttttttttttgtagagacaaggtttggccatgttgcccaggctggtctcaaactcctgggctcaaatgatccaaccaccttggcctactaaagtgctgtgattacaagtgtgagctgccatgcctgg

SEQ ID NO: 95458 - DNA, 214565 bp, Homo sapiens
  misc_feature (1)...(214565): n = A,T,C or G
tcttctttttgcctttctatctattcattttatctatctctttgaaacacccagtcctgaaattaatggatcaattacacccttaatttattctaaggtctgcattgggtctgctgtacaagtgttcctctggaacccaggagagaagacaagcaactatcgggggaaagttttttcttatggcagtggtaaatgtgccagaagaccagaggaaaatgtacaaagcctcttaatgcacagcttggaagtggcatacatcacttccacccacaggccgttagccaaagaagtctcttggtcaagtcctaagttattaagtgggaaaatacactctgcctatgatgagacgatgcaaaggtatattaagggaaggctgaaaattggagttaatggcatctattaataccatgcccaaagatgggaacatctatcatcctatttaaaaaatattttggactaacagatatactttaatggtgcaagtcaagtttgatacctgcaagtataaaggtgattggaatctgtaatatccttcagttgtattgtagcactgaatgttgttttgacatatcaaatactgtaaggcataggtgtatcttctccaacagcaatttattgagcaaatagactggccagttaattccccaaaacatattacttagagattttttactataaacccccatatagtagataagaaaagagtgtcctggagaagtccagcaagatgattggccataattataatgagctcgagcttcctgttctgctttctctcttctgtggaccctacacagtcatatgatgtataggatgtttcagtcaacaaagaaccgcatatacaacagtggtcccataaggttataacactgtatttttactgtactttttctatgtttagatgtgttcagataacacaaacccttaccattgtgttacaattgcctacactattcagtacagtgacatgctatacaggtttgtagcctaggagcagtaggctataccctataacctaggcatgcagtaggctatacaatctaggtctgtgtaagtactttctttttttttttgaaacggagtctcgctctgtcacctaggctggagtgcagtggcacgatctcggctcactgcaaactccgcctcctgggttcaagtgattctcctacctcagcctcccgagtagctgggattacagatgcccaccaccacacctagctaaattttgtatttctagtagagacgggttttcaccacattggccaggctggtttcgaactcctggcctcaggtgatccacctgccttggcctcccaaagtgctggaattacaggcgtgagccaccacgcctggctgtgtaagtactttctatgatgtttttgcaacaacaaaatcacctaataatgtatttctcagaacatatccctgtcattaagtgacacatgaggttattctgaattctgttctgtagaccagccctgtccaatggagctttctatgatgatgaaaatgttattttacattctctactacggcagccactagccacatgtagttattgggcacttgaaatgaaaaactgaaatttttgttttatttaacctaatttaaaataatatttaagtaaccacatgtagctaatgattcccatgttggccaggtggctctagtgaatgcttgctctcagagtagaggttaaaaccattctaattcaggggattctaaatggagtatcagatttctaagggaacatatctcagacaaatagtactacaatgttgctgaagcaagtaagaagcccatatattgttgaccaaagcaagtgacaaggtcaaagtcaaggtcaacaggagcagggaagtgtaatcttcccataggtcaaagctaggtatataagacatagaaatttctttcttcttttctcctcttctttccccttcccaccgtccttcctcacctcctcctcttcttttgcaaatacatttaaattttatattaagtctattcttctaggtggcaaaaattaagttttaggcaattccatctccatcttggccaatgctgcctcctcctcctgatcatcatctttgatctcaatagctttcacatccagctgtttcaggtacatttgtgtatcctcacagcacacatgcagacaccaaatcatcgcacatggcttgggtgcagggagctctggggctgccactagcctgtggtatgggtacctgaggcacttcatatagatgtcttactggtcctctgtcttagaaggcagaggatctccacaagcttggccatgcctagccttcactccaggagtggtgtacagcttctccactgtgctcagatgccccaaaacgatatgatatatctgtcttcagtctgcctgcccccaacctaattgttgaccatgggtaaaagcaaggtgcatgctactttctcagagaaacccactgtagcagtcagcttagactcaattatgttacagcaacaaacctctgatttaaaacagcaaagataccttttgctggggggccacatcactgttccacagcatcccctaactggttcattggcagcgttaagaagaagagggcaggatcacaaaatgactcctgaaacttctgccctcagaagaagcgtaaaagtcacctctgtgcatattcattgttcaaagaaaatcacatgaccgatctttacctcaacagtaaggtaaaatagagtccttcccatagggattggcagtgaaattttttgggcattaatagtatctgcacaagcatcatctacttttcttctctctttctctcccgctttccagtccccatcaccatcttcaacatctcacagcctgtaggttctttatttagactaagcaggatgatatatgctttataatctactatttctgacatagactattaaagctccaaagcctgtattctggaaactcaaaactcttttcttgaagaactctattctgtcacatgtgtttctgaagctcttgtttctgcactattatcccttccccggggtagaaagcagaaaatgtactagctgcttcctgagtgaaggaagcattcaaaggaagacagaaaatctgtggagaagccaccagttaataaaacattattggaccacactctggcaggggaggctgccaaagggatttccctttggaacggaaaaatcttgggattgaaggcaggggctggcatgatattggagttggctaccagagttcttgaggattagtgctaacaagtagaactttctgagaggatagtaatgttctttatctgtgctgtccagtacagtagcctttagccacatgtggctcttaagtacttcgaatgtgacttgggtgaccgaggaactaaattctgtttttattttattttattttttattaaactttaagttctgggatatgtgtgcagaacgtgcaggtttgttacataggtatacacgtgccatggtggtttgctgcacccattaacccatcatctatattaggtatttctcctaatgctatccctccccttgcccctacccgcgacaggccccggtgtgtgatgttcccctccctgtgtccatgttttctctttgttcaacccccacttatgagtgagaacatgcggtgtttggttttctgttcctgtgttagtttgctgagaatgatggtttacagcttcatccatgtccctgcaaaggacatgaactcatcctttttaatggctgtatccatgtccctgcaaaggacatgaactcacccttttttatggctgcatggtattccatggtgaaaatgtgccacatttttttttatccagtctatcattgatgggcattaggattgtttccaagtctttgctattgtgaacagtgccacaataaacatacatgtgcatgtgtctttatagcagaatgatttataatcctttgggtatatacccagtaatgggattgctgggtcaaatggtatttctagttctagatccttgaagaattgccacactgttttccacaatggttgaagtaatttacaatcccaccaacagtgcaaaagtgaggaaccaaattttgaactttaattaacttaaattgcaacaaccacatgtggctaggggatactatattcaacagtgcagttctggaagttaccagagatagtgttgctaaaagtcatacagtgaccttaatgtcttaccgtttatacacataaaaagcatgttgtactttgctttttaaaaaatctcaaaatggaaataatttcacttaatatagacatcatattgacattataggtacagcatagttggttaaaagcaaataatgccttcatttattcactggctggagttgtctgacctaataagcagaggctaaattcacaattaattaaagatttcatgttcattcagccaagacatgcctcaaaccactttttgttcagctagccagcaagatacttagagccatatttaggacatcttgcaactataatcaacatatgcaaaatatcctatttcaaagaagatccttcctttataagattagtaattctgttgtatgaacaggatttttctctattatgctaaatataatcattttgtagtaaatgaatacggcaatgtactatatgaaaatttatatgtaatttgattattgtaatttaacaaatagttctcttactgaagatcaggcagcatatttttctatttagggatgaggaaacagaggtttggagaggttaagctgttttcctaaggttatataacaggtatgtggaattctgatgcaggaactcctatctgtttaatccaaagtgcctcacacccaacaatactgcttttacttgatatataatgataaaaccttgatatataatgataaaacctaactgcaatcaccaatctttttcttttttttcttttcttttttttttgttttttgagatggagtctagctctgtcacccaggctggcgtgcaatggcgcgatctccactcactgcaacctccacctcccaggttcaagctattctcctgcctcagcctcccaagtagctgggattacaggtgcccgccaccacgcccagctaatttttgtatttttagcagagacagggtttcactgtgttggccaggctggtgtcgaactcctgacctcgtgatccaccctccttggcctcccaaactgttgggattacaagcgtgagccaccgcgcccggctcacctatctttttctaaggatagagaccaaagaagccacaaccccttccaaggagtcaactgacgccaatgggatgctgtggtgcaggacacttggggggtgctgcagctgatgccccttggtctcctggtggtggaagggaaatgggactagatacgagattggcatctaagccatacaaaaaagctgtctcagacaggttgggccagtaagcacaacgtcacttatctatattggcttctggttacctaatgggtttggtttggtaaaaattaagaatcagacttctgggatgcaagctatgcctgttcaaaatctgctgtcagcccctgtgtttcaagcttaaccttgaacctcatcattaatcaggtgaccttagaccgttttatcagccacgtatctgctagcataaatctcccttctgtgaattcagaacactgatacctcacattcactaaaaatacaatgagagacagatgctcactttctttatttgctgttgtattcttggtcccactttgccatttttaaaacaggaaaacgtttcccttactcgaacgctaaagtgcaaagctgctggtgacgctgccttctcccacctccgcactccactgtccttgcaaactttggacagaggaaaggtgggcacggggcgcgaaactacaagtcccggcatgcacggcgttctccgcacaggcgcacggggaccgccgggccagccggccagccagcctgcggagactcccgggtccccgcgccggactgggactgggagcaggcagcccgggcggagcgggccggtgccgaggacggccccaggcattgctctgccccgggcattgcgcggcgcgcgtgagggggatgcggcaggaggcggcgcggcgggaggagtaggcggcggcgccctcgggagggagctgcgcgcgggccagacggcgcccggaggctccgcagtgccgccgccgtcgcccgggaggctccgcgcgggagccatgtaaccctgcggcgggctccgggctgctccgtccttccccagctcccgggctagcgcggcagcggggccacgatgaagaagcagttcaatcgcatgcgccagctggccaaccagacggtgggcaggtaggtcacccgcgggcaccgctgtcggtgcgcgcccgcgaggctgcatccgcaggggcgcgcaggtgatggagcccgcccagcctccagtcctccttgcctcagtcctttcccctgcaccagctccctccaggcgccgctcgcaggcgcgacccctcctccctaacttcccagaccccggagctcttctcactcgccgccttctgctcygggctccggttgccaagcgcaaagtgtgacgcatcctttacctgcgtccccggctgcyccttcgcttcgtcctccctgcctttccccgggactcccttctccctctggccgcctgtcttcctggaaacaggtgtttgctctgattgtgctggaggcagccgaaccgcagtcggtctccggagatctcttccctcccctcccctgcgccgagttcagggctgctcccgggtccagggaaagtgctgggcctggtcggcctgcccctcccgccgtgtttgttttcagggactatgactgtacgagattctggatcactttcctggccgggtttcttaaggcgtttggtggggggaaagggtgaggggtgggagaggaargaaggtgctggtggaatggcgttgctgcctgcttgatgttaggactgatttcagtggagggagggaggctgcaaaaaggaggcccaagtcctcgggaagatgagataagcagagaatcgcagccaggtaggggagggggacagaggccccacagtcagaagagtcaggccccgggaagctgcaagaccccgcctgctgccatcacggtgaaaatgggctacatctggactccaggagcggctctgcagggtgccaacatctattaaggttacataaaaatcctggtgggtcgctcccaagactagacattctttgaacacaggagcgttaggtagaagggatttttcctggaacccctactcctggggagggatttccgttgctgctgtggcaaaggaattcaggtgtgctgttctaaagcaatcagaaagcaaagaatccagccttgggtgcagttcaaatgcaagctcaacacctcgagggctctccactaggtttacggagaaaccgaatacctttcttgggtgggaagtggagcctgaactggcatctggtaggatgggggtggggacatccctggggaataggggacatctgaactcccgtctgagcatactgccctagttacagtgggcatttgagggcaggggatgcggtggcttcttatgcttccagggactccagatggtttccaagtaacaatgtctaaaattgacttggattcatttttccttcccaaacacatgtgctttaacatgagggggaatttatgaatagcagagtcagattagcccagatttctggcatggtattgccacagatatagcctcacgtggactgccttttgatgtgttggatgccgagatagtgtttcctggtattcgttgtttagcagatgacagtcaagccgacccgtctttaatgtcttggcttcttcgtcaccctgcaggcgggcattggccatcacctcagaccagccaagtgaccaggaggcccctgacactagacttgggttgctggtttctcttggtcttggggtttcagtgccgtgctagaatctaaatgttcagaacatgtttatgcctcctccctggccttcctgaaacacaattcttctttttttcaggacctgtttttaaatgggggagatttttgcgccatggcatcatatcttatttttcagcctcatccatggggggaatgcaaaatggtgaggggaggttggatttcagaaaaagtggtcttaggtattgagagcacgttcttggaagtccaagcagctggttaccaagaggttctttcctcttctttgttggggctctggtggatgttggcctatggatgaattctgcctttctccgttggtagccattgtgttgtgcactgggccaggtgagggccagcctgtatcgcttttgatgaaatccagagcaagccttttaaagcaaaaaccagttcatgttaccttgctgctgaaaagcttccagcgacatctgattgtgcttagcatctcatatcttgccagggttctacaggaccatccttggttggccttttttcttaactctttttctccccattctcatctcttcacattcatggagctctagccgtgtggcctttcttgccccaaacacactgagctcatatccaccttgaggatttcgtttttactgttttcccattttttttgttttttgcttggctgagaatgtgctccttccaagtagctttttctcatcatttcagtcttggttccaaggccttcaagaggcccttcctcccctatttacctccagctcatcattttttcatttctggacagcactcatcactgattgaaacgcttttattttttattttcttgtctgtctgcttccagcagaatctattgattgctgttgtatgcctgtgtagatagtgcaatgccgtttagactactgactctcaatcggtgttgattgccgagattaaaacggtttaccccagggtccgtgagggtcagcgagaggggcagtatctcctctattattgagaatgttttgggtcatgatcctatgagtattggagtaaaagagcccgcggttgcctgttaatttcttaaatcagtagaagcacataggattggaatttggactttaggtgtgcagttataaagcacttgatttttatccttatatttttctaaagttttcctctttccgagggaggactaagaggacttgaaagtccttcctcatggctcgccttccctaagttgcaggttctggagttctgaatataaaacttaaagtcattttaacaatgtaggagttgccctacttaaacatactctgctgggttactagtactttctctcgaagtgctcacatccaagtcatattaagggcgtcagcgactatgaaaagatttgataaaacccattgtatttaactgacaaaagtttcagcccctccttggtctgtttccttagtctgcacgtgttccttctgctttgaactttcccctttctgtcccttcacttcaatccgtcctttgggaagcactccctggccactgtgtgcctcatggttaggagcacaggctttccactgggacaggtttagtttgttgctgactatggaatccagagcttaattctctgcacattaattttcttacttgcaaaatgggagtagttaaggattgcactgtggtaatgtggtaaccacagtgataacatagataacctgtgaaaagtacctagcagtgctcagcactaggaaatgcttaataaatggtagctacaagtatctctgggcaaatgttatgactgttattgaattatatgcactatggcatatgtacctttattagatgtctactgtgtcccagacactgctctggttcagggagtattgcagtacagggcaaacaaaattcctgtttgcctggaacctgcattctaggccgggcgtggtggctcacgcctgtagtcccagcactttgggaggccaaggarggtggatcacctgaggtcaggagttcgagaccagcctggccaacatggcgaaaccccgtctctactaaaaatacaaaaattagctgggcatggtggcgggcgcctgtaatcccagctactggggagtctgaggcgggagaatcgcttgaacccgggaggtggaggttgcagtgagccaagcttgcaccactgtactccagcctgggcgacagagtgagactccatctcacacaaaaaaaaaaaaaggaacctgcattctaaaagcatgctatggtaataatggctcacttgtgttataatttttatcttttgtcatttactttccccactagactttaaactctttggaggcagggacagctgccctaacgctgccctgtatagaaggtcctctgtcattctttggcaatggaatgagtaagtgaacaaaagatccatgcgctatagataggggagtcttttgaagtagttcaaagatggggaaagctcctgataccatgtttctttaacgttgtgatggtggtcagaggagagaggaacagctgcacttctgggcattggaagggcagagcaagatttacgggagaatttggttcttgcctgattgatggcagcatttttctttttaccttcaagagagtctagcagttgctggagtgagaagcataccgaaaggcatagagtatttttcttggaagtgacatttgcttgatgttgggtggagcaaagccctgagctaaaatttggcacccacgagacccactaagataaagcaaatggaagaagtaatggtaccttgatttggtggggaggacttttttttccagtctgcacagtgggttcacagcggccccatcctcagagggctgtcatgaggttggagggagcctggtccactgaagtcctcaacaaatggttgaggtggttcgttgtcactgaacacccattcaagtcttccaaaaataatgttggcctcctaagtagaaaaggattcttagaaacgatttcaacagctactgcccagtgatggtccaagtggggcttgtcctcttgtttaaaatgagtgatgttcaaagtgtctgggagtaggtgaggaactgtgggtgtgcgggaaggagaaggctggttgggtcgggttgaattgtgtggatttagaggctatgagttggggagtgaagacaaagttttgtctctggagccttgttttctattccttgactgctttgcatacattgcaaagcaggcttggtttctggtgcacagctttgcaggtatcattgctgctgtgcagctcttggaattcagctgcagaggcctaggcattagccagtggtggggagcctgggaactggaggctgaggctgcagcagcctctaggagcactggtgctgcagacatttttgtctgggccaaagctgccaaagtcagtgaggatcttttccttgaaggtatctctgagacattgccctgccttgtagtaggccttctaagagccgtgacccaatcaataggacattagaggaaaatcagaaccaattccaaatttggctttggactgctttgttccttcccttctatttcccttactgtgagtwasacctgccagaccaacacaggccctgccatgggcttcctgttagcccagcagggctgggcggacccaaactcgtcccccaaagagcgctgtgcacattgaatgggtctcagagcaaagtttttcattagagttttatggaagcccaggccttactgcctgttctgctgtatatatgtgagagataacagagtgtactaacccaccgattactgggttagcaaatctggagagaatattctttgctcttatcttctaagatcctcactgtgtgggtctgctgggtttcaccttctgmtgagctgctgtcagcagtcagcctgaagctgtctagatttcctgcagaattctgttatcccagacctgcaagtcatcgtgaggaagccatgctcttaaatagcaattaatcattttccttcccagtttgtctccatcaaagtaatttatcaatgattttttttttttaatgatgggcaataaggaccattttttttttctctagagaaagtggatcagtagccatacaaatatactggtaatttatggtcattccttttagaggggattagtaagtatcccttttattaataatcaaaagcagtttatttcaaatgctatttgataaagacagcaaataataaaattatgctacatctgtgtggatgtagttgtaggtcaggcaggaggttggggggagagtcagagagtcaggcctcttccctcgggcgtggggcatccaattgagctggcacctggaactccaccgcctttgggaagcttgtggctgtctagcaatttcaaactcttctttctgtccaggaagcagatgttttgctttcattttccaactttagagcttatttttagaataaatgtttattttcccacagaattcaatttactttttttaaccttcattttggttatataagtaatatttgtttatggtagaaaaatcataaacttatggatgggctaaaaggaaaaaaaaatcacctataatctcattacccagagaccatagttaatattttggatatagtctttcagtttttgagaagtatatctatctatctatctatctatctattctttaaaaagagtacagaccatactctgtatactgttttgtaacctgtttttttttcctttatattacatcttggatatgatcccatgtcaataactgttaatccccagcataatttttgaaggctatacagtattccactgtagttaactcattttcttttgctactcacttagcaaatatttctcatgaatttagcttcttaggatgaagtcttagaaatgtaattgctgggtcaaagaatatgtgaatttttaagactttgaatgtgtatattatacacacatacatacacactactttcactgcagccttgaacttctgtgctcaagcgatcctccatcctcagtctccctaagtgctgggattacaggtgtgcaacaccatacctgaccccacctcttttattttctagtgaggctgaacttttctttgttttttttttttgagatggagtctcactctgtcacccagcctggagtgcggtggcatgatctcggcttactgcaagctctgcctcccggattcatgccattctcctgcctcagcctcccaagtagctgggactacaggcacctgccaccacacctggctaatttttttttttttttgaatttttagtggagacagggtttcaccgtgttagccaggatggtctcggtctcctgacctcgtgatctgcccgcctcagcctcccaaagtgctgggattacaggtgtaagccactgcgcctggccttgaggctgaacatttttaaagttctcttgacattagttgccttttctaaattgcctgcatttgtctttgccccatttttctaaagtcatgttcacaattgttttcttattgatgttaaggtaatttttaatatattaagcatatgtatgctttgtcatatgccacacacatctccctagaggttttaaaaatttttgttgtatgtctcttttttcttttggccgtgtataaatttaacattttgtgatcttaagtctatctatttgtggtttgttcttcagtgttatgtctggggatactttgcccagatgcagattatataaatatgcatgcatttttattactatttataataatttcattttaccttcagatctctagtgtgtcagtcattgattttgatgtatgacatggcttaggtataatacttacgctttttaaaattgattaccctgctattgattagtgtaattcatacccaccatattgaagtatcatcatcattgtgtactaaaaaatttcatctacttttatctttttctgtgatttctagtttgttttttattgtctgttggttctggcaggaatttaagacgggctcagctacccagataagcagtggtgggttaatccttatcatgagaccccgtccattgggtgggagtggagtcaggctgaacttctcagctcagcttcaacccgggccattcctgggtctttagagcacaacagcctttgcctaaggatcatgctgtgtcttaaccacagttaacctccaaattgctccattatgaaagaaagttgatcagttttcttgactgtgctcatttgtttattgtctctcagtattactttttaaaagtgtatattaagatggaaaaaaatgggcatttttacaatattgagtataatgcgaattcttctcatctgggaatagggcatgtttattccaatctatttataatcctataaagtagtttttgtccattttgctcctrtacaattttgcttttacttataggtaatttgtcagtgttgttactgtagcttcagtgatttgaatcttttattaaattatatattttttcttactctttgttgctggaatgtagcgaagttgttgatttttatgtaattatcttaacagccgccttcatgaactatctcattatttttaaatactttttttaaaaaaattgagtctgtgggattttccagggagacaattaggtcttctgcaaataataattttgtattttcctctctggtggtttatacttgttttattttctcacctaattgcattgtctaggacttatagaacaatgttaaaatatcatggcaatatgtgggcattcatgtcttattaacctcaattaaaatgcatgatgattggtttgagatattttgttttttaattatgttacatattgcataattttattttactttgaggttttctttgacatcaaagttaaatttgatttatcatggcatttgcagataatcacaatgtgtttttttctttgattttgacatcactcaataatttattccgtatatatttattggacacttttatgttccaggcatcattgatacatcaatgatagagtcagtacccatgaggagcttgtgttttggatgtttgaacctcaatagattttctaatattgagctctccttgccttcctgcagttaatcttgactatggtgtgttcatatttttcaatactgcttgatttaatttgttatttaggatgttggcattcaacattcataaatgaaagcatttgatttttttcccccatatctgtcatgttttgttaattgtgtaaaatgagttgttcaatgttctttttgttcctatagaatggtaagatggagaagtactcattctttgaagataaaaacaactttccaagggtgttttctggatgtagttctttgacagttttctggatttcttgaatggttattggactattcatgttgtctattttttcttgagtcagtttgaataacatatttgatagaaaagcattcattatactatgattttaaaatttaatagaaagtttttgagtatatcattgtatttctattgtcattcctaatttacaattctgtttttccctttgacaagttttgccccagaggaagtctctccctaccccrgtcagtaattagatttaagctattttcatttggatttctttctcattagcttttgatcagcacatatgttttctagtaaattctgcttttctcagatcctttcctcctgatttccctgagtttactttgttcttttcctggtctttagtcttccatgttgtgttaggataggttaagctctgctgtgataacacatgagctctggaatttcaggggcttaacatagcaaaagcttcctttaagctcatgtgaatgtgatgtgagtcaggaggactcccatggacagctctcctccgtgtgtgattctggaacctagtctatccatcttcccctccacctcaaaatctcagtatgtggttttcagtcagtgctaaaggtaaaagagaaaatagaagtggtatactggctcttagatgcctgggcctggaattcacaaacgtcacttatgttcacttttcatgggccagtactagttccctggatatgactggagacagggagcctccacccctgttgaatctccagcagtcttctttctctccgcttccactgctcatgacwgtcttttgaatctacagtcttctctgccccgccctaccctccgacgttcaggtatgctcactgcaaactctgcctcccgggttcaagtgattcttctgcctcagcctcctgagtagctgagattacaggcagctgccaccacaccaggctaatttttgtatttttagtaaagacagagttcaccatgttggccaggctggtctggaactcctgacctcaggagatccatctgccttggcctcccaaagtgctaggattacaggtgtgagccaccatgcccggccagagaaaattaattttttgttttgagccctttctacaatagggagaggaataatgaagagaacagaaactatcctactgtactggaatggcacctactttatggggttattgtcaaggttaagtaagatagtaaatatcatatccttagaataacccctggttgtaataagcactcaataaatgacagttattaccaatattccttgccgtgctgaaagtgtctttgacatgaagcatttattttgttatttatattcctcgttacctgaaaattacaacttgaaattgatacccatttgtctccttttcccaaatcaagcccagtttttctgtatttagccaagagcatgcctgaaggcagcaccttgaggtatcagtaattgtaatggcttcactcattgaatccccatkgtgactaatagttattgtatcactcaatttaagtctaggttaagcagctgtaacaaaagcccccaagtctcagctgcttatagcactggccagtggagggttggaggcagctcttctgagacccaggctgcagtgggctcggttccacacatggtgcagtgatggcagaggcagtaaatgaggatgtgagaagttatatcctggctctgaatattctggaagtgacgcgtgccacttctactctcaaagtagaaggcaatcctgataccggccaaaagtcatagagccacagaagccacatctgtgtcatctgttgtcaggaactaggctatgtagtttataagcattattttaattcactcattgcaacgtctctgtgaatggggctatttacagccccatttcacagatggggaaatagaggctaaaagcggcagagccagatttgaaccagggcctaagtaggtcagtcgtaggcaaatgcctctcctgcttctctccccctaatcttgttatttctgctgcctcagagtccctcaaagttacttcagtttaggtggttttagaaatgctaattaactgctcctgacttgaataaaaataaaaatgtcacgttcatttaagataattgagtgtcttgtatgtacccttaaccacaaggagcataaagtgaaatttctgccaatagaagattctttcactttgttttttttattgcaatttcagcagaaaaggtaagagaaagttctttgtagctctatgctgagagacagcagtttatctgcaaaagcctctacagactcctatgtaacacattaaccaaacaaggacctgaaaacatagagtctgagaaaggaatatgaaaagtggacagagcttttagcactaggaatctcatgcacactgttgcctttgcagatgtgtgtgcacactggcttggttttcctagatgctgtttaagtgtgtcctctgacggacacttgtgcagtaacggcacagaccttcctgttttatcctcccaacaactcttaagagtaggttctggtgtctcccccattttctacacaagtctcagagcaggtgagtgccttgttgctgctggttgcatagctggtgagggaagtggtttgagatttgcttccagaaatgctggctctgacattgatatttttcatcactgtactttaatgactctgcagtagggaaagaagcataaacaatgaaatgtctaatattaatggaatgattaagtaaattctggtacatttgcacaattgtaactattagtgtttttatgacattcaaaaaatgtctaagggccgagagacatgtttatgatagggaacaggatatatgagtgcatacagggttaagattgtacagtattttaaaaaatgcatagaaaagtctggaaggaaatcaggaaagactagaagattaagcataaaatgttatctctgggcaggattatgagtgatttgatttctgctgcttatgcttttttttaacttccaaatttcttaaaataaacgtgtattttattgaagagagagagaaaaaaaaagcttccagggctcaaagtagacaactgtagtcagaatttcttagaatggtattttattttaactttggggccctaaaaagtctaagtacaaatatgtttccagttgccttgactcctggttttaaatgtgagaaatctcttatctttaatgttctggaagggacgtgatgtcagatctcattttctaggataaactagtctgccattggaaaatgatatgctaatagccttttaggccattgctactaattttaaagacataacattttgagacttggtctgtatgacacatagctgaaatttgctggttcccccataatcagttagggttctctggrtgcagcagcagaaatagactctagctaattttagcaaaaaaggagttttgggaagggtggggatggttgaaaaatcaaagggaagagctggacagtgcggcctgggagtgaccacagagtgtccctgctgcagggcaaaggacagtstcgtcagaggccactggcaaaggagttgcttcaaaattcttttctgtcattgggtcactcaggtgattcacatatgacagtctagttcgttaagtccgatcttcacttggaaacagggggagaataggaattctttcgattgacagtctacaatgacagcagtgaggagaggcagagtgcaaaaggaaaatcagactcttggcccgaggacagggaagggatgatgctgtttaacatacccagttgttgaccaggctctttaatcagtgacatcaaagaccccaccttgatcgatttgccagggttctacttactgatttagtgtgtttcctggcattcaaagtagtccattcttttttatttctttttttttttttttttttttttgatacgaagtctccctctgtcgcccaggctggagtgcagtggcgtgagctcggtccactgcaacctccgcctcccgggttcaagtgattcttgtgccttagcatcctaaatagttgggactactggcatgtaccaccatacctggctaatttatatatatatatatatatatatatatatatatatatatatrtwtwtatattttttttttttttttttttgaggcagagtctagctctgtcacccaggctgaagtacagtggcgcgatcttggctcactgcaayytctgcctcctgggttcaagcaattctcctgcctcagcctcccgagtagctgggattacaggcgcccaccaccaggcgcctgtatttttgtatttttagtagagacaggatttcactgtgttggccaggctggtctcgaactcctgacctcaggtgatccacccgcctcggcctcccaaagtgctgggattacaagcgtgagctaccgcgcccagccaatttttgtatttttactagagatggggtttcactgtgttggccagactggtcttgaactcttgacctcaagcgatctgcctgcctctgcctccctaaatgctggaattgcaggcgtgagccaccatgcctagccccagagaagtccatttttatctcttacctatccagttggctcctatgaatccatccctgaattatattttatctgtttctcctttttaatttatttaaacttgatttaagagacagtgtcttactctgttgcccaggctggagtgcagtggcgtgggtcrtagctcactgtatgctcaacttcctgggctcaaatgatccacccatctaggcctcttgctttttaaatttctgtatcttaattatagtctgcttctctagcctcgacttttgcagggactcctttctttgtattcttgcccttagcctcttcttcctctgacttcccgcaacacagcccagaccatatttttgaatacatggactgaagaatgtaattttcctttttttcaagttttgttctgtggggaaaaaaatcctagcactgttggaaatactgcatactataaatttatcttagaaatttacaatctatatttgtatttacggctctaagaagttctgcagttaagaaaactcgtgatcatttgtatctcttggattgctttcggttataataacagatgtcataattcagagtggcttaaacaataagggaacttttattccaggatgatagggcatccaaaggtaggaggagtccaggtgtcttgtgattaagtcacttgctgtctttctctccatttttcttcgctttgccttcatctgtgtcttggcttgtttccctgtcaaaatacaggtgtttgcagcaattagggtgatttgcytccacrttcacaaaccaaagaggagacaaagaagcagcccaagtggtcctgatcatggaataagagcgctttcctctagtctaggccaatttatttcacacgtttactattgaccattaacacatgctggagggaggggttgcagagggctgatggtgcccatgcttctgtctttgaagccagaaagtaggattatgatgactggcttagatccatcaagaccccatctggagttggacgtggggatagcctcgcctaagtcaggagaccttcatggcgaagggatgggtacctgggcaaatmagagttttcatgggaaggaaggaggaggaaagtattcaagtaaacagccaacactatccactgtgacttggtttaagccagcattttgagtgtgaatactgtttttcatgggatacccattcttcaaactagagtttgtaggatgtgtcatggagattgttcttcaatgaagttcaagtattcccctttagcattcaacactttgacctttgattaagctattgcctctcctttccatttatcgaaactgttctttcagattcaagagtgctggttcacactgaggtataaaacttggtgtattgtattctagttatacttctgcacacatctgtctctggtactaatctataaatccctagcacagtgtctggaatgtagacatagaatagactcaagaactgtttgtcaaattcattcctagagtgcaattcagacatccccccttcctagcttcctccatcattcttgaatgggaatctggtgtccactatatctgctatgttctaagttctctgctagaagtatgagggtggttagaaagcaattaaatatgccactgaaatagaggtggtatctttgatggtagatgaggtgttcatggcatgatgagaatataattgagtttggctgtagtggggggttggaagaggatcctagaactgagacctgaagggggaagcactgtttctttcttggtgcttccacagcactctgctcattttctcacaccacttattttttcctgccttgatttttagttgctgttggttctgttttcctgactctactagaagctgtgtgtctttgcagggattggggtttcttcatctctgtgtcctgactggtgtccacagtgctttgcaaatagcataagcaggtctttatcaagagtgtgaagaagacactgtatgtgctcctctaaaaagtctcaaagatagatatttttatggcccctaaattgagttttttccatgctaaatatgtgtctgttggcttatattcatgccttcataatctccaagatttttctgtactaacaagaatctgactttggcgttagaattattagtagttcctagtgtattgtcwwtawctccaaagcattctcaagccatacctatgaattgcatagtcatatatgctaagaggagtatgtaagacatggcagcttattgagtacagatggtccttcgttaaacagatatttaccgaccacttaactggcatagcttgggtctctgcaaagcggatactgagaatagcatgcagcatgtttactagggagtgctcttagcatcagtacctgtggaagggagtgaaaagaagcaggactaggcagagggagttgagctgtgatgcagtctccacaaaggcttcagctggttccatgttaggggtgagttcagagttattctgagttgggaagaggggaactgagccttttcacctcttcattgattagccattgcatgtgggcttcccttgaaaggtggtgtgaccttcagcagaggcagtggcaacggacagatgaccaagggtggccatctgacagcatttctacctagcagagggggtataagtcctttattcctgaagggaaatctggcgtacactatatctgctgtgttctaagtcctctgctagaagtatgagggtggttagaaagcaattatatacgcctttacaattgaggtggtatctttgatggtaaatgaggtgctcatggcgtgatgagaaaatagttgagtttggttgtagtgggggcttggaagaaagtcctagaactgagacctgaaggggaaagcatgttagcaggctaaggaaagtgggaatggcaggtgtgattgccaagggatatagagtatgtctcttttaagaaagtaaaataaattcttcatgttgggaatatcaytgggagttggggtgaggcttgcaaataggatgaccatctaatgtattatacaaactggggccatttctgagagtgatcatgtaattaataatgctggggacagcaagtgaaaacctgggtgaattgtatggtcaccctacttataagacatggttgtgcagatttggattccatctgagaaccaatggtaaattactgagtggccacttgacatckccccatagtttttggttatgagcatggattctgatgtcagattcccataggtgcatattttggctctatcacttgctagttgtaaaaccatggacaagcccatttaggttttgtcagcctcaattttcttatctgcaaaatgcagatagcaataaatctatcttatgttcaaagataaacttagacacatttacattttcatgactttatttgagcatttagggattcatgaattgggcagcaccagaccaccagtggttcagggctctgttgatagggggtaagagggaaacttttataaggtgtcgtggaagcaaaacaaaaaatatttgattgattgaagtggaaagtctggttagaggtaagtttctgtttcttgcttggtaaagtagtctctagttagagatttgttggtgatttcagattggttgagcttaagtttcattttgcagcttatattgggttgagtttcagtttgcttacataggaacccaaggcacaggaaccatgtcgtctcagcctaatggcctcctaattaattttattgacacttatgtgcattaatacacataaagtggaattgaagcattgaatcggagcagtgctgagcagagaggagggctgaggaatagttcctgggacagagtaagtcctcagtgactgtgaattgccattgttattattttaaatgggaatagcaaggtcaggcttgggttttaaggtgatcacccagcatccagaggggagaaccagatgtagaggatgtatttgtctgttctcacactgttactaaacacacacccaagactggataatttataaaggaaagagatttaattgactcacagttccacatggctggggaggcctcacaatcatggcggaaggcaaaggagaagcaaaggcatgtcttacatggtggcaggcaagggagtrcgtataggggaattcctctttataaaactatcagatcttgtgagacttagtcactatcacaagcacagcatgggaaagacccatccccataattcagttacctgctacactgggtccctctcgcaacatgtgagaattatgggagctacaattcaagatgagatttgggtggggacacagccaagccatattattccacccctgacccctcccaaatctcatgtcctcacatttcaaaaccaaccatgccttcccaacagtcccccaaagtcttaactcatttcagcattaactcagaagtccacagtctaaagtctcatctgagacaaggcaagtctcttctgcctatgagcctgtaaaaccaaaatcaagttagttacttcccagatacaatggttacaatgtggatacaggcattgggtaaatacacccattccaaatgggagaaattgaccaagacaaaaaggctacaggcctcatgcaagtctgaaatccagtagggcagttattaaaccttaaagttccaaaatgatttcctttgactccatgtctcacattcaggggacactgatgcaacaggtgggctcccacaacctggggcagctccgcccttgtggatttgcaggctacagtcccacttctggctgctttcatgggctagcattgagtgcagcttttccagacgcatggtacaagcggtcagtggatcttccattctgggttctggatgacggtggccctcttctcacagatccactagacagtgccccagtgggcactctgtgtggggctcgaaccccacatttcccttccatactgccctagcagaggttctctgtgaatgccctgtcactgcagcagacttctgcctggacatccaagcatttccatacatcctctgaaatctaggaggaggttttcaaacgtcagttcttgacttctgtgcacccacgggctcaataccatgtggaggctgccaaggcatagggcttgcatcctctgaagtcacagcccaagctgtacattggtctcttttagccatggctgggatgcagggaaccaagtcctgagactgcgcaaaggagtacgaacctgagtctgcctcacaaaatcattttttcctcctaggcttccatgcccatgataggagggactgtcatgaagacctctgatatgccctggggacattttctccattgtcttggtgattaagatttggctcctcgttacttatgctaatttctgcaggcagcttgaatttctcctcagaagatgtgtttttcttttctcttgcatcatgaggctgcaaattttctgaacttttatgctctgcttctcttttaaacgtaagtttcaattccaaaccatgtctttgtgaatacataaaactgaatgcttttaacagcacccaggttacctcttgaatgctttgctgcttagaaatttattctgtcagatgcactaaatcatctctatcaagtttaaagtttcacagatctctagggcaggggcaaaatgctatgagtctctttgctaaaacacagcacgagtcacctttattccagttcccaacaggttcttcatctccatctgagatgaacagcatttggtcaaagccattcaacaagtctctaggaagttccaaactttcccacatctttctgtcctcttctgagtcctccagactgttccagttctgcctgttacccagttccaaagtcacttccacattttcaggtatctttacagcagagccccactcccggtaccaatttactatattaatctgttctcacactgctaataaagacatacccaaaggaaagaggtttaattgactcacagttccacatgactggggaggcctcacaatcattgtggaaggtaaaggagaagcaaaagcgtgtcttacacggcagcagacaagagagcttgtgcagggaactcccctttataaaataatttcttcagacctcatgaaacttattcactatgacaagaacaacatgggaaagacctgccccatgattcaattacctcccatcaggtttctcccttgacacttgggaattatgggagctacaatccaagatgagatttgggtggggacacagccaaaccatatcaggggagaagactggtgccagagtgactaggtaggatgtgatacactcaaccaggagactaattacgcagtcaaagtsagataatggtcatctagatcagatttgtggccatgaggaaaggagccatggaagggtttcagagataaaggccatggtggaacttgcgggagcagtgggagataaagctgctgctgggsttggtgcttgggcaaagggtgcttgtgccagtcactgagaaggagcctgtgagaaatgcaaggagagaaacccaacaggcaggtgggatgaggggctggagcctgggagggagatctaggggatggtggtgaggaatcatcagcaggggggtggaactgaagcatttaatcagggcagtgctgagcagagaggagggctgaggaatggcctgtggggcattagaaagtactagrtgttgtggaagtaaagggaaaatactggtagctcccatttagcttagagtgtcacccataagggaaatccttgtttgacccactgtgttagtttcccagagctgccataacaaatcaccacaaactgggtggcttaaaacaaacagaagtttattcttgcacagttctgcaggatakaagtttgaaatcaaggtgtcaccaaggctgtgctctctgaagaatctaggggagaatctcttccatgctggtttaggataaggaatatcttatcttggttcccagtttctggcacaaagcttcaaacatctttggaatatcttcagtgataggagtctctttattatgctaatatggtgactcataatggggcgatagaaagcttgaggatgagggctggtcaccagaaaggacaaccatgtgacaaatgggttagaactttgagtcaccccaacttctggggaggggagaagtggagatcgagctcagtcctgtggccactgacttaatcartcatgcatatgggatgagatctctggacattgaagctcagtagggctttccagttggtgagagcacattgatgtgctaggagggtgatgcacctgcaattccacgaggaatcccctgctctccaccccagacctttccctgtctatgtatctctttcacttggttgtttctcacttgtatcatatacagttgacccttgaacaaggagggatttagggagaccaaccccttgtgcagtcgaaaatccaggtgtaacttttgaccaccccaaaacttaactaccaatagcctccggttgactggaagtgttaccataacacaaacaatcagttagcacatattttatatattgtatgtattatatactgtatttttacaataaagtaatctagaggaaagaaaatgtgattaagaaaatcatggccgggtgcggtggctcaagcctgtaatcccagcactttaggaggctgagacgggcggatcacgaggtcaggagatcgagaccatcctggctaacacggtgaaaccccatctctactaaaaatacaaaaaaattagccaggcgtggtggcgggcgcctgtagtcccagctacttgggaggctgaggcaggagaatggtgtgagcctgggaggcggagcttgcagtgagccgagatcgcaccactgcactccagcctgggtgacagagtgagactccttctcaaaaaaaaaaaaaaaaatcgtaagaaagagaaaatgtatttaccattcactaagtggaagtggatcatcgttaaggtcttcatcctggtcttcacattgagtaggctgagagggagaaggaagaggatgggttggtcttgctgtctcaagggtggcagaggcagaagaggtgyggaggtggaagaggaggcaggacaggcaggcatatttggtgtaacttttattggaaaaagtctgtgtataagtggacctgcacagttccagcctgtgttgttcaaaggccaactgtatatacgtctgaaatggggcagttttgtgaaatattctttccttgttgggtctgtattaagtctaggtaattagtgtcagcattgagttgaattttaggacacccagttgatgtcagagaacagtattggaacaggcatacctttcttttagtttccggtgtcagcagcaatccttagttttgtttggcttataggcacattcctccagtatctgcccctgtcatcatgcgtgttctccctctgtatctctgcgtcccttctcctcctcttaaaagggcatatattggattaagggtctaccctacttccactacaaccttctcttaactaattatatctgtgataacaatgctgtttccaactgtattcacattctcaggttcctgtggtcaggacaccataacttctgggggacacaattgaacccacagggcccacgaagcacacatttctcattcaacaaagagtatttttttctgcctgctttgtgccaaggtcaggggtggggaacatgaggcaaacaaacatgagtaagtctaataatcttaccctcgaggggcttatattccagtaggaaaaataagatttataaacacactgctgatatttgaggctggtttttacttatgccctaagatagtatgagatgctagaataattgggaggccagaaatatcacgtatggcttgagtaatcagccagaattcaaggaacaaaaggtgatttcggttggacttcggaaggacgcatgggatttcgacagatggagatgagggaaaaatacaagggaagatttaagctagcaaagtacactaaagcaaaggggacatgcaaatctaagacctggatctagatgtgtatagaatttactcctcgaaacattactaacgcattaaatagattgtgagacatctatagatgaattttacctgaatcagatccaaatgcagcaatatgcagccacctccaagacacgctgacaggggaacagagcaagatgctcaacatgttatatgtatttgacctaatttctgtaaagagaaataatttctgtatggtggataaataggttcacaaacacacgtggttaacatgctcacaagtgcatagaagatctctggaagaatataaaaagttgtgaacagtgcttctcaactggggaacagggaagagaagcagactgcatttcttactgaatgcatgagctactttcaactctttttttaaacaagctactctttgaactgaccttactttggcattttgaaataccttatttcccttaacaacttaaaaaatcacagtcatatggtgttctataaaagtctctacttatctggagtattgcctttattgatccacccactcagcaatggcaggtcccatgcacacatgcaagggccttggagtaattggaccttggtttactcagctccattacttctcactgttggccaatgctgcagtcaggccagtctccttagagctgctttgcaccgtcctgcccacgctatgttttatgttttgaatttgctttgcatgttctgtttctaatctcctgccctgggtgggagtggaagagggtgaggagagtcgggaaggaaattgaacggttttctcacaacagtctgaccctatcagtcaaccacgattcaagaatatttacactttaagatatgtgaaaagttaaaggaggttttttgttttttttttttagaaagataaagagcaaatcaaaagtaaaaataaggagacagcaggagataagaaggaagagagaaaaacaagaggagtacctcagtggaggagtgtgccagatagacatgaaaagttaaaaccactaacagtgtttgttatatgtaatgtagggtgcaatatatgtatgcttgtctgtatgcacataaacatgcatatatatgcatacaaatacatacatttctatctgcatatgagcttccttgtctttcactgtgacttctattcaagtaaagaattaatctgtatctgctccaggtacagaaaagttacaaaaaaccagcttgagagatggatgctcagtaacaggaatggatgtgtgacttggcacgtcccccaccacacaaagagagtgtatctttcagattctgatacactctccttgggtggtgggaggcatgtttatgtgcatatatacaaggatacatatattgcaccccacatcacatataaccatgtgggcaaattattcccaggctgctgcaggctggcatttctcctggctcacggtgagtaccagtgtggaactgggacacacgtagtccaactgtctgccgtcgtgactcattgcccccttcgacctcaccttcttggtgttatatttcgagatttcatctaaatattcagaagggcaatctcttcctttccttcggggttatcgattatgttttatcttcttagtgctgaccaaaagcttaattgtctacagcggtgtttatcaggctttcttaattcatctccctttttgataagcctgaaatgtgtatgctcttctctttggggtttttcagactctgatacactctccttgggtggtggggggcctgccaggtcacacacccttccctgttactgtgcagccacctcccaaactggtgtttttttttttttttttttttttgagatggagtcttgcactttcacccaggctggagtgcagtggcgtgatctcggctcactgcaccctccgcctcctgagttcaagcaattctcctgcctcagcctcccgagtagctgggattacaggcgcctgccaccacacccggctaatttttgtatttttagtagagacggggtttcaccatgttggccaggctggtctcgaactcctgacctcaggtgatctgcccgcctcggcctcccgaagtgctgggattacatgggtgagccaccgcatctggccccaagcttgtttgtgtaacttttctgtacccggagcagatatagattaattctttacttgaatagaggccaccgtgaaagacaagcaagttcatatattgatgggaatatatgtttatatgcatatatgcaagcatacctatattgcaccctcatattacatatagcaaatgctgttagtggttttaatttttcacgtctacctggcacactcctccactgggtgtactcctcttgttttcctctcttccttcttatctcctgctccctccttatttttacttttgatttatctttctgaaaaaaaccccaaaaaacccccaaaaaagcaaaaaccctcctttacttttcacacatcttaaagtggtaaatattgctgaatcatggttgactgatagggtcagattgttgtgaggaaactgttcagttttcttcccgactctcctcaccttctcccacccctacccagggcattagaaaccctggtttgattttccttgaacctcccccaccacctgcttttacttctcctctctcctggctttagagaagtgaggacaaaaggactctgctgcaggttgttcttttgattttttttttttaaaagattcttgtcctggctttcctgattctccagagtctcctgggattttgtagaacaaaatagaagagggaggagaagcagggttcccctaaaggttatcctgtaggcatttagaatgtacaatctcatacacggctgtctactgtatttccttgcaaacattccgcctcgcacttattctgtgagggaaataagcagtttccccacatagccaataaaagtgtattgtgttcaatactaggagaaatacagaaatagccttggtggggtagaaaaggctggaagcgtgaataatagaatatagcacataacaaagaggtaaagactaaaagatcagaaaggattttgagtgggagaatgttatgatccctgaggaaaatgatagatttttaaactattatgaaattagagcccccatgactccattttacaggagagtataccagtcaggagaagataagaaattggctccaaatcaaagcaagtaagtggcagactagaacctagtggaatccaggaactgcccaggtcccaaattggccgttgggtggtatgtacataggtcagataccaacaacatgacaagaattgaaaactctctttcctctccttttattgcttgagaagcttcatgggggaggtggaacttgaaagtgagccgttaagaatagttcagagttaaataaggagatgagcaggcagtctgtaggaagagaaccaagtacagagagttgggaatagatgttgtgtttcacagtcactggacagatggaactatttagaaggaagtgggtattgtggaggttggtggaaggtcaaatgctggggagactgggcttttagtggggctgtggaagctgagcacagtagttgagatatggtctgtgaggcagtgggagttactgaacgcagttgaaaggggaagtgagattataggcatggttgatttggaacagtaccttagttgcagtatgcagggtggattgaaaaaggggagcctgccatgaaggaagccaacaaagaaaatgtcaagtagaaggcagatctgtttgagcctcttggtttttaggcatatttgggtggtgagaaatggttttctctgctcctcagcactcttcttttattcatcttgaagctataaacttgagcaaagaaggtgaccttctccagttgagaaggtataaaactaaccatacacacccctgctaaaactgccacacaagcttttaggacaaaatcagtggacacttaaattaatttgagtggaatatgatgaggaattatattagggtagggaaagtcataaatcttaaatatgataaaaaggatgaaaattggaaaggagctttaagctgtcattattttcagatatgattgtttatgtaaactaaaaaattactgcaaatgaataattagaattattaagagtttagcaagcttgctcaattcaaaagaaaggtggggtgtatttattaatatatcagatacagtgaacttcaaggaaaattacagagataaaggaagacattacatactgataaaagagtcagtttaccagaaagacaaaataattctacgtgtgtatgcatctgagaatagaggctcaaaatacatgaagaaaaaagtgatagaaccaaaaggacaagtagacaaatccacagttataggtgaggactttgacactcctgtcttagttattgatagaattagttcacagaaaattagcaaggacatagaagaactgaacaacactgtaaaccaactggatctaattggcatttatagaatacttcactcaacaataagatatacagaggatacatattcttttctagtgctcgtgaaacattcaccaaggttgactatatcctcatccataaagtaaatttttaactgattttaaaatgtgaaaccatacagagtatgttctctgaccataatggagttcaactagaaatctgtaacagaaagataactaggaaaccccaaatgtctggtaatatagttaagtaaataatccataggtgaaaagaggaaatttcatgggaaattaaaaagtatttagaactgaatgaaaatgaaaacacaacatatcaaaatttgtggggtgcatctaatgattggagggaatgtaatagcattaaatgcttaattagaaaagaggaatggataccccatttaccctgtgattattatgcattgcacgcctgtgtcaataaacctcatgtagcacataagtatatatacctactatatacccacaaaaattaagaagtaaaagaagaatggtctcaaatcagtaatataaggttctaccttaagaaaatagaaaaggaggaacaaaataaaccccaaatcaggcagaatgaaagaagtaataaagagatgagtagaaatcactgaaatagaaaacagaaaaaaattagaataaatgaaaacaaaagctgatgttttgaaaagatcgataaagttgatctggccagaccgactaaggaaaaatgtaagtgaaaacacaaattactaatatcaggaataaacaacgggatatcactgcagacctggaaagttgtttaaaggattaaaaagtatcacacaccattttgcacataaattggacaatttgagtaaaatataccaactccttgaaaaccgcaaattactgaaattcaccaaagaagaaataatgtatcttgaaaagtggagataattggaatacttttattactataaatagagttctttttgaaaacaaaactctgggaccaggtattttcactgacagttgtaccaaacatttgagggaataacacagtctctttcagaaaacagaaggagagagaacacttcatatctattttgtgaggtctttattacactgatagtaaaatcaaagatattacagaaaaagagaattatagacgaacagtcctcatgaacacagatgtaaaaaatcttcacaaatcaaatgcagcaatatgtaaaaaatataaaacattatgaccaagtgaggtttatttaccccagtaatgtatggttgggccaacattcacaaatcactgtaatttctcattttaaatgactcaactggtacagccaaagcaaatgacaaaattcaaaatccattcatgataagacattttaccaaactagaattattaggaattttaaactggtaaggtgcatctggaaaagaaaaaaaaaaaaaaaaaacaaccctacaactcacatcatatttaatggtagaagagtgaacgcttttcccctaagactgaaattgaggcagggatgttcgctttcatttcttctacttaaccttgtagtggtgatcctaatcagtgcaataaggcaagaaaaataaataaaagacatacatattgaaaaagaataaataaaactgccactatttgtagacgatgtgatcacctatgtataaaatactgagaactctatgaaaaatctcctagaactaataacaatttatgaaagtctcaagacacagaaacgtctaaacgccacttatatttctgtatacctgcagtgaacaatttagaaaacagtatttagagaagtagcaaaattatgtgcaggatccatgtgccaaaggctataaaacactgttgaaagacattttaaaagacttttaagtgcagacatagcatattcgagattgttggattcaatctgtttatgatgtcatttctccccatattgatctataggtttcgtgcaattcccatcagaatttcagcagcgtatttttgtagatacagacaagccgactctaaaatttgcatggataggcaaaggaactagagtagccaagacaatctagaaagaagaacagagttggaaggatcacactatccaattttaattacagtaaagctactatgaacaaggcagtgtggtattgataaagacatgtacatttagatccaactcagcagactagagagtccaaaatgaaacctacacaaatacgatcaattgattttgaacaaagatgccagggcaattaatggagaatggatctcacataaattagatcatatggcatgtgttcttttgtgcctgacttctttctcaatgtattatttttgagattcatacgtgttgcatatatcagtatttttttttggtctttttaagtattttgttgctcaaatatgccataatttgtttatccattcacctattggtggacatttgaattatttccagtttttggcttttttgagaaacatatgctatcaacattatggaacaaatctctttgtgaattgtgtttttgtttctttggataagtacctgggagtaaaattgatggatcaattttgtaagaaatcaccaaacagtttcccaaggtatttatatcatctgtactcccaccagttatgtccagttgctccatacccttgtcagtatttgatactgtcaagtttttttttttttttaatttttgccacttcagtagctgtgttgtagtagtttatcatggctttaatttgtacttccttaacaggtaatgatgtgaaacaccttttcatgagtttattggacattcaggtgtctccttttgtgaaatcctgttcaatcctttgcttatgccaaaaatggattcttcatctcttctgttttgatttgtaggagttctttatctattttgcatgtaagtcatttgctgattgtgttattaccaatgctgccccctcattgttgcttgccttttcgttttcttgatgtctttatgaacagagtttttaattttgaccaagttcaagttatcatcatttcttttatggttaatagtttttgtgtcctattgaagaaatcattgcctatgccatagaaggagatattctgcattttcatttggaggctttattagtttacatttagatccgtaatccagttcaaataagtatttgagtgtgttgtaacataggagttaatttcattttttttccagttgaatatccaatttatccagcagcatttattccccattgtattgcagttgactctgtcacaaatcagttgatagtatagtatatttaggtctgtttctggactgtatttgtagtttattcatctttaaaattttttctgaattgataaataataattgtacatattcatggggtacgttgtgatgttttgatacatataatacccatattttaaatgttttaaatattattttgtaactactcaggatttaataacacaatttttaaaacttcaactaaaaaagtgaaaaagaaaaaaaattaccagttatgataggtggagagtattaaattccaggtttaagtaaaattaaggttaagatgtatttctaggtcatgacctggaaaatggagttgataagctgttgtggtgtctgtactgtgttcctggcactatcgtgggaatacaaaaatgaagaagatggatcttgtccttgaggaacatgtgggtgagtgagagatagaccatatagtaagtctgtgttccctcaacaccacatggataccttcactgaggccctacagtgtgttgaatcatgtgattgaaggtttctcaagaagacatggctaccaaacaggcagatttaaaagacagaccttggaaaagaagattgaatgatagagattttatgttatcccagtgtgattttatgttatyccagtgtgatagttatagaagacctgagaatatgtgagtctcggaagaacaacctttgtttctttcacttgttcgggcaggcagaggctttgaagaccatatctaaaaccctgaagaatggatagatgtctcctggctttttggaagagaaagaagttataaaggttttaactgtagttaactgccctaatctttatgcttttccaaatatgcccattagattttagtttggcatatgggaagatatttggcactgatgacaatctcactgatttggcgaatttatcatctatttgaacaaacagctaagtcagaagaggtgacattatagactagcagaaggcactggccaaatctgactgaaatcaaaacaggacagttgtgcaactcagcaaggattaaagacaaaaacaaaaacgtgggcatggggatgagtaagggatgtgttgtcttcaggtgtttccatttacctggttatcrattgatagaaaacaatgttatcagtaaaactgaagttttgagattagattattgtggtttttgtttataacctgggtcagaaggttattcacaaaataaaaaagttctaaatgtgccttgggccttggaatttgcatggcttcatatatgcagctctttcagctgtgatatccttaaggcaaacaagagtcattttattatacattgcacaatgttagaaaaccagtcttgttactgtatgagttacagaagttggacagacagcataggtggggcagatagctttccctggcctaccgtgagctagagagccattgcagtgcctgagcattaatctcaaactttgatcctaaaacaccaactagagaaaatagaaaagcaaaaaatcaaaacagagcattatgtttctttcttccaaaaggaagcagagcgttatgttcctttccttttggatgttttccaaacaatgtgaatcacggtttttaaaatctttactttcacaatgttgcttattaaaaaaacaacatctcagctttgtattatagatcaaccgacttcctatagggaaaggtaagtagtctagttattgctttgattttgattggcatctcctaggattattctgacactaccattagaagatttatacactactttaccaacttacatataaagacctatagtcctagtgttggatgggcttgggatttcattagctctaggtgccaattctagttgattgatactttgttgaggcactaacttaaaagtattgagagtctgagcctggatttggtcaaggagggctacaatatataaagggttggcaaactttcctgtacagggccaggcagtaaatattttaggctttgtgggaaactactctgctattatagtgaataaacagtcatagacaatatataaatgactgagcattgctgtgttctagtagatcgagttataatcatggatatttgaatttcatgtaattttcatttgtcacagaatatttttccagtcatttggaaatgtaaaaattattcttgtggaccataaaaatccagatgatgggcagaatttggtgtgtaggttatagtttgctgccccctgcaatggattgtcactggttgcccttggcttgggaggaagagtgatagcattcctgctctttttctgggttaaagctctgatacctcagggagttcaatgccaagaggtctatgaagcataagtaaggccatactctatttaataaagcattactgttaattatttatggaaagaaaccaagtctagaatgcaagccattggcaaaccaggatagaattgtttcatcactttaggccttgagtggaagtgatgagagctcaacagaaacaattatgcagccacagagcaaggaagaacatatgttcaatagtgaaatgttggttctcctggctgccctccttgcctggctactccactgtcctccccttcccaatgcacatgtctgactctgaggctggacttaggtaattcagtgtgaagtctgtaaaaggggcagttgatcttaaagcctaaaagaagtgttgcacagcttgcgttctgttcaagtatccagatggtggtggtcctaggcagagctctctccttgtctactgcactgtgaagatagattttgctttctttctatcttctttcatctgcagaggcccgtaactcagaaatcggcctgggtaaaatgtgcaacttcgtgtcgactctgtaatatagggtatattgtatctggcaatccctcttgacagcagatgccatagcagcttgttttttgggaggacatgattgtccttatgataaaatgaatcttcagagtctcagtttcccttaatacttctaatcaacttggtaaccatcaaactctcttgaaatacttcccgtgatgtttctgcctgcagctgagttggaggaggtgactctaacgcaggttggtaccactgtgacttcttgaccactcaacttaagtgagccccrattcttgcctcacatccttttgtcagatcagcttgytcttcattctccagaacgatagtatttctttccttttttactttcctcaaacttcyccagtcctttctcttatggccaacctcactttctccttcctagagaaaattgaagctctgtcagatggatggaacgatcttaactttttgctaagaagttaagactcactatttctattaccatctctctcctctgccccacctgttctaatagagaagctattctttctctatccttccatctggttctcatcttttcccaaactttgctgtgttatattatcaagtatctcttctctctcgtatattcaactgatctctcaaatagtttcctccatcaacatttgaacatgtttgatttcttccatctcaacagcagaagatctcttgatacttctccttaactccatctagctttcctcccttctatgttgccagacttttggaaagacttgtctgtattcactgtctccatttctttgtctcacattcatggtatatattaccctatctggcttctgaccctgttgctctaccaaaccactctgcccaacctcagtaaagtatcaaagtcaccgaactccatcttgctgaatccagtggtacatcctgtgagtctttcttatttgaccttttaacagaatttggcattgtggatcactttttcttgaactgcctttgtcttccccttggcttgaatgataccacattcttctgggtttcttcttgtttctctggccactccttattggtctccagtgcaggaaataatggatttcctcgtggatcactctacagtgtctccctgtgcaattttcttcatgcccttggcttcagggaccattctgtgtggatgactctcaaacttaattctcctgagccttctttgagctgcacatggtcaatccacagggcctaaaacaccatggaaaagagtttgaattttgagcagaggagtgatatgattttgcttacatttttgaaaagatcactcttcctgctgggtgcagagtaaacaatggagaggcaaaagtggaagcagggaaacctcttaggaggttaatgtccaggaaagaagttctaggggctgggtctagggtgttgtatccagctggatgttcaaaatgacctcacactccccatgtcatgacctaattcatgatttctgccagacttcctgttgtcacctgccccatctgattgagttggaaacctcgaccctactttctttttctaattcatcatttgatactctggccctcttccactttgcttctaacacagtagccagagttgtcttcaatacaagtctgatgccatccccaggataataattattttcggtgtttcccatcactcagaggaaaaagactagaaaatctgaatatgtccatctaaggttctacacagcctggccttaatgtacctcgctagcctcccctcgtacgtccttccttttgcttctgcacttctctaccttctgcttgtgttgttctctgccactctgaccacttttatctactcatttcctagtcttccagaattctgactgaagtatcacttttggggaagattttccgtagtgcttgactaccccagtttaggtcaaattctcttattttatgttcttgtggaactggatttctttccttttgtaggcttatcttagtttctaactacatgctcatttatatgattatttgattactatcttttttgagatggtgtctcactctgtcacccaggctggagttcagtggcatgatcacagctctctatagccttgacctccctaggctaaagtgatcctcctacttcagcctcccgagtaactgggactacaggcacatgctaccatgccmagctaaattttgtattattttgtagagatggggttttgtcatgttgcccaggctggtctcgatctcctggactcaagccatcttcccaccttggcctcccaaagtgctgggattacagcatgagccactgctcccagcccttgattactaattttttaaaatgacatgagggactgtattagggttctttagagaaacagaaccaataaggagtgtgtttgtgtgtgtgtgtgtgtgtgtgtgcattatagagagagagagattgattgattttaaggagttggctcatgtggttgtggggattgttaagcttgaaatctgccgggcgagtggcaggctggagacccaagggagagttgacgttgctgtctcaaatctgaagtctctttttctgggggacctcagtcttttctcttagggtttccaactgatttgatgaggcccacccacattattgagggtaatcaagttactcaaagtctactgatttaaatgttacttacatctaaaaaataattcacagtgagatctagactggtattttaccagttactgggtactatagctagccaagttgacacaaaaaaattaaacatcacagggaccatgtctgtgttagcccattattatatcctcagtgtctgccacaatgtatgacatgtagaaggcagtcagtaaacattgattgtatggatttgagagcgttaactttctactttccacctgtagccaatgccagtgagtgttgtacatttcatggctataaggactgttctttggagtagtcctttgtgttcgttctaaaatattttgttgataaacagttttgtgatttaagagagatctctaatttttgacaagtttgggtttttttaaaaaataattttaaacttttaagtcaggggtacgtgtacaggtttgtttgttacataggtaaacttgtgtcctggggtggtttgtacagattattttatcacttagctattaagcccagtactcgttaggtatttttcttgatcctctccatcctcccacccttcactctctgattggccccagtgtgtgttgatcccctctatgtgtccatgtgttctcaccagacaaatttgttttcttgtaattcatttatagaccctcttagcctgtttctttgcagactcttttattctcatcccataaaaaagccttgtcagccatttgacttaaccattggattggctcttttcttacattcctcttgtgtatttttcctgtattttcttggatgcagtagccagagccaactttgttttcagtgtaattggaccatgactttatttaaggagataattgcatttttatttcctaatgctcttcaattttattggccattttggcgacagcagcacattgtgttgaatattctatttctaaaaccaaacttctcatcctggccctgtgtccagagttgtctatttctgtcactggtgccagacaccaagacaagaatgcttggatttatccttaacttttcccaccctcaccattcctagtctgttacaagattctcttgattcttcttatgattcttcaacattgatcctttttatttgtccatttcttacaacaagcctttatgggctcatgccagataactgatttcttcttggtgtctttacgactgttccctcccagcttcaagtttttgtagccagcaacctcagatgaatcttcctaagcatcagcttgagtgtgctttcttctccctacctcccaatacccaatcaccaccttaagcttctccctacctcccaatacctaatcaccaccaaagcttaagtttgattaagattcaaacttgatttccttttcctactggaccttcagtacagaggattaagttaattttacttctcaggccatgacatactatcatttttggtctctgtaaccctgttctcttatttatttaattcctttattctcttttagtgacaatttgaatatattgttttttgtctgtgttcttataaaatatgtattgttgttttggttattttaatttatatgacttgtactctagatctcattttattttgttttatatatttcactgcttttcacatccttctgtgatgccatgtaaacatgcagtctaatgcgtctaattgctgtttctctttttattcacatcattataaggatgataagaaaataaagttataagtcaattttttatgaatgtcaaataaaaaaatccaaaataaaatattagctaaacaaacccaactttatatttttaaaatatatcacaattaagtagtatttatttccagtaatgcccacataataatataatgatggaatagtaatatattcaatataacaataacctttcaattttatttacttcatgtatatctatgtatgtttattagaatttaatactttactccctagaggtctaatgtactggttaggttaatttttctatatttcatggtttatattgccattatgaatgatatacagttatgctatattttatagttgggtttgactgctggagagtcatgagattgatttttaaaaaaattagtaacaaccttgatgaagtctcttactgccaagatgggtggatctcttgaggtcaggagttcaagaccagcctggccaacatggtgaaaccccatctctactaaaaatacgaaaatcagccaggtgtggtggtgcacgcctgtagtcccagctactcaggaggctgaggcaggagaatcacttgaacctgggaggtggaggttgcagagctgagatcgtgccactgctctccagcctgggtgactggccatctcaaaaaaaaaaaaaaaaaaaaaagtctaatagttacttatctattaacattttaaaatattacattgaatcatatggcaatgctgatatttgaccgtatttttgcctataatgtctgtaattttaaatatttcaacctaatagatgattatattgtctacaaataatggtagtttttttctctttctttataccttatattttttgtttccctagatttttcagaacttctagactgtgttaagtagcactgataatgaatatcctacagttttcctgttaaccacatttcttctaggttttgggttcatgtagagatactttatcaagcctaagaaaatccttcttatcccagtttgcaatgaggtattttcatttttttcctaatcacaatagaagttgaattatagcaaatgctctttctgcatccattgagataatcatgtaggttttcttttttatatatacatgaagtaaatgaaattgataggctgttacattgaatcatctgggcattactgggatatgtactacttaattatgatatattttaaaaatataaagttgggtttgtttagctaatattttcttttggatttttttttctttcttttttttttttttttttttttaaagacagagtctctctctgtcactcaggctgcagtgcagtggcgccatcttggctcactgcaagctccacctcccgggttcatgccattctcctgcctcagcctgctgagtagctgggactacaggcgtccgccaccatgcccggctaattttttgtatttttagtrgagacggggtttcactgtgttagccaggatggtctcgatctcctgacctcgtgatccgcccacctcggcctcccaaagtgctgggattacagggattacaggcatgagccactgagcctggcctttattttggatttttatatcacattcataaaaattgacctataactttatttttttacaatccttatatggcttaggaatcaagattgcaaagtttagttgcattaaacaagtcacgcaactttcatttctatcttctggaacaatttgtataaggtagggattaactcctattgaaaggtagaactcaccttaaaactattgtgtcttggggggtccaaactacctgttcttcctaaccttaactgtgttcctatatcaccctcttacctaattgagctggtccgtcattcctatttctatttcagcatgtttctgcttgctgttctacttgatgtaacaactttcctttcctctgtttgtctaaaccttaccatttaaggccagggtgcagcccaaatcactcttgaaaccctttctgatgccctgggccttcagcagccctcctatttttggcttcttatagtatatattgtctctttcactcttttgacccttggcatgagcaacactgcataaatatttatccccatattagtatatatctgggacctctctgcacctcctcatttaaacctggattttaagtctcaattgtacatagaacccagcctctcttggaagttctatttgttagtggtgatcatttgattatatcrcactcagctttgatcaacctgacctgttcgtattgacataatcacaccaacatattccaccttaaggctttttcactactcttttcttcttttgcatcatacctgcatgcatgattcctagttttattgagtctctgctcaaatgtcattttyttcatgtggccttccttgaccactctatttaaaatcgtagtcctactgccccacattcatgatccaacccccatcctctgctttattttaattatattttgttgtttattttctttctctgcctattgtaatacaaggtcatcagggtcagagattttaatctgcattgtttactgatgtatcttggtacctacaagagtgcctgggacctatttaatactcagtaaatattagaataaatgaatgaaaccaaatatgttagccttcagttaagaacttgtcctgcaatttagtcctcctaccactaagcaacagcaaaggagaactggttatttaagtcctggggttttgggattgcaaggggattgaagcctttttagtaaatatttattcaaatgcttccccatctttgccaaaaagaactatgagtctttttcctatgattgctaaattatcttaagccaaagaactcatttttttcttttaagatgctccgttgagaaaattatctttttgggtacttttggataatttttggataattgctctttggggctagttgtaagagaggtctttttttttcttcctggttctttgactactcttggggtctgcctccagtcctgtccctcttacagtaagatgtggctgggaggagagtattgattcctcagattgttacatcttcacttctcagattgttttaaattcagtgtctcatggctcaaacttcttatcataggagatatttcctaagtcgctcttatgctctcctttacctggtaatatgaggaatcaggaagatgtggtgggattagtttctaggtccagtctagtcaccatttgccttgcgaccttaggcaagtcattttatcctggagagttaagacctcccccactgtaaaatgagggaatcagattaggtgccctgtaaggtctttttttccagcagctaaacaaaaaccgaagaaatatgttattattttttttccttttgatagggagctattcctgacagctctcatctggtgttttgcttaatttacacacaatgattaatttacacacaagcttagcttgtatcccttagcaacacttagcaactgcctgctttcagaaagtagttcagttaaggttgtttaaagggacattatcccatatatcaaagcagaagtgaaaataaagttgactttgtctggggacacgtccccttctgactttgcagtaatttttctttattacattttcctgttcggtttttgtccacttgcacagtttttatgaaccctaacagaagtttattctggctcgctttcaaaggaattaagtattgagtgtttactatgctccagaacatggtcctaagttcatgccataccttatctcattgaattcttcaacaactcttgtgaggtcaggagggtggttaccttttacagattcaagaaaacatcttaagcctgcacagctagtcagtgaagagtccagcagtgagacttggctgccggactccagacaccatgctgttcacctgtgctgtgctttctcctgttattttaccaaaatctcctgtttacctctgtcaacaaccagcaaagccrgacgcttgttaaagtggtaggggcagtttaatgggtaacatactatggcagtagggaggatgtttcagcatgaactggactcagcttcgtttgtacagaggttactggtgctttaaagggagaataggggaatgagcagaggctccgtagagtcagggaagtgaaaaaaattacaaaggcttggtcagtgtagatgctgattagaccaactgtgtctgtttgctggcaatgatccaagaagtcaggattcaaccctcccatcgaggccctgttctttctgatgagtgcatttcagagggatggatagctttcaggtccttgagaaagacactcctgaattgtaggagatgtatatgcatctcacagggacacaggaaggattcaccattgtaagccctttttactaaagagtgtaagaaacaatggtcaggggcctacagtcagatgttggctagaaaaacagtaaattcttttgagtgttctcaggcaagcatgttaacaggaggtagagtcattctagggatgagaccgtgacctgttagaaactgttaatgtttgttaaatctaacaaactcagagaggagtttggatgatgccatttgtgttgagagtctttagttcttataggccaagactgaagcctaggccagaagagtgctctgattgtaactgcccagtaggttctctttgcccactgcccagaaagagccaatttaccaagacaggggaacttcagtagagaaagagtttaattcctgcagagccagctgaatgggagactggagttttattattactcaaatcagtctcttcaaaatttattcagagactggggtttttaaaggataatttgatggatagggggccagggagtcaggagtgttgattggtcaggtcagagatgaaataataggggattgaagctgtcctcttgcaccaagttgtttcctggattggggacacaaggccagatgagccaatttattgatctgggtggtgccagctgatccactgagtgcagggtctgaaaaataccttaaacaccaatcttaggttttataatactagtattatctgtaggagcaactggggagagtagtgatcctgtggcctcttagcttcatgactcctgagccataacttctaaccttctggctaatttgttagttttacaaaggcagtctggtccctaggcaagaaggggctttgttttaggaaagggctgttctcatctttgtttcaaagttaaactttaaactaaattcctcccacagttagttcagcctatgcccaggaatgaacaagagtcaacttggaggttagaagcaagatgaagttggttaggtcagatgtcttttattgccataattttctctattataatttttgcaaagtcagtttcaaaaggagcctagctagagtttggtcaaggagaaaatctttgtcactgctcttgtttgtaaaagggaaacattggaagtctgtaaagatcattctggattgtccatggttggtttctggagttaattttgttccagctcataaaatcacagatctcccttgttctgctagaagcccaacctggcatggcctaaccttttccttccccgacgatagctattctctgtttcactcatgagcatcacagtttctgtgcctgggcacagtactatttgagagctcccctgtgtccctgctccattcccaggctctggcaaagctagggagactatcctagctagaacagcttagggtagtcttcgttctgtttctctgttttgtcggagagggcagtgccactggataggagtaaagtttggggaagaaaggggaccaagtaagaattactgagcatgactctgagtatccttgaatagtgtcctgtgtctgtgtaaggctttagcactgcatatgtgtttcatattgatggactttttcgtacgtgtctgtctgtattcatcatagtcctgatgacataataacccccattttatggttgggaagctgatacccaactagcttaaagtcggtgcctccctgactctcttgactcttttccgtgtgttttgtttttgttttttcctttygtactttatagaattcacatttccccaaggatgtttctgtgatgcttgatgggccccttggattaccacctggtcctgctcttcctcttctttcagttttcactttttctaaccccttggtgatgaaatgagtcacactctataaaatatttgaagagatttattctgagtgaaatatgagtgatgcagccctcaggagatcctgagaatgtgtccctaaggtgatcaggccacaacttggttttatacattttagggagacataaggcatcaatcaacacatgtaaggtatacattggtctggtctggaaaggtgggacatctggaagcaggcgcttccacgccataggtggattcagagattttctgattggtaactgtttgaaaaagttcttatcaataggaaaaaatgtctgggttaatgtaaggggttgtggagaccaaggttttatcatgcgggtgaaacctccagggtagcaggcttcagagagaatagattgtgaatttttttttttttttcagacttaaagaggctgttctatcagtagcgccaaaagggaggagggtataataaggcatgtccagctcccccttcccatcagggcctgatttagttttccaggttaaggttggaatgcccttggccaagagtacgggtccaattagatggttgggggtgcttcagaattttatttttggtttatgcgttgctttttagaattttaagcattttaactctcaggagctgctcctctctcccctctccaccgtccactcttcttgctcctggctctaagccgccaagtccttgcatttatttcattcttgagtcttcttccatatgtctaactgacaatatgctccttactctgctaaaagtatacattgggtttacattctctgcataaggaatatatctgttatgaattttttaaatattggaaagctagccataacactcaacattttaacatttagtgacactaaaatccagcagtgagctatgatggcatcactgcattccagcctgggcaacagagcaagaccctgtctcaaagaagaaaaatcctgcacaaaaataaataaacaaaaattgtgtatgttgcttattcattctactagtaagtgtttgttatatcttccacactgtgttggcagtggggataaaacatagttccgttactaaaatgtactcttggataaaacaacataaaccaaaaacatacacaaacaaagtcccttcccccatgaagtttattttctagtaatagtgatgttctcagaagaggcataatattagggtgttggagaataaggttaagaaatcagtgggaaatagaaaatttggataaacaacacattttttgttttctttatgatgctagcatctccttattattaataatgtaaatacatgatatataattttgttttatcctataattatatctaccatgttagattataaaagtacagcttactctaatcattgcaagtttaattgcctgtaattattttgagtttttggttgctaaggagactgaaagggaaacttgctatgagggttgtaaaggtctgaaaaaccaaatgcatttttaattcatccgaataatcttgcattagagaaatagagattgtgtgtgatgtcgagaaagaacatcccatagaaacccttttggctgcagggcctggccttttgacaaatttaatttagaatgttcgtatcaaatcttggggaaaggttttcaactaaggtgtaaatgatcaaatggtgtcagttagtgtgaattttaattgaaataatccagttgagttgaggcttgccaacaccctcaagaataagaaaaacgtgtgcacagatgtgtgcagatgtgtatgtaggtacttttttagtcatgttcaaacaagatgactaataagaaatatcaggttctgggcattgataaaaggcagaagagataaatcaataccgtaggcatgatgataaaagttggtaaataaaaaggagaaaattagactcctcagttgctgtttgtcttctgagaacagtaatcttctgacttaaaaagataaaatgagtatttgtgatttggagttaatactcagatttcataagaaagcattatcgtgtttttaccgtggttacgtggcatggtcacaattgctggtaattttatttaattaaaaaaaattgtgaaaaacatatgacatacaatttaccatcttaaccatttttaagtgtacagttcaatcttgttaagtatattcacattgttgtgtgatagatctccagaactttttcatcttgcaacactggaactcggcactcattaaacaataacttcccatttttctctccctccaggcgccagtaatcactattttactttctgtctctgtgaatttgactactttagttaccccatatagttggaatcatacaatatttgcctttttgtgtctggcgtatcatttcatttagcataatatcctcaagttttatctatgttgtagcatgtggcaggatttccttctttgtaaaggcggaatagtattccattgtatgtatatccacattttgtttctccatccatgtacatttgggttgcttccatcttttgtctattgtgaataatgctgctatgaatatgggtgtgcaaatctctcttccagatcctgctttaaattcttttagaattatatattcccagaagtgggaatgactggcaacttaagaacttgtagataaggacagaaatgcttgaagagcagaacggagcaaagttatgccaatcttttttaaaaaaagagtttagcaagtgtgctcaattcaaaagaaaggtggagtgtatttattaatatatcagatacagtggactccagaccaaggaaaattacagagataaagagagacatggctgcatgcggtggctcatacctgtaatcccagcactttgggaggctgaggcgggcggatcacctgatgtcaggagttcgataccatcctggccaacatggcggaacactgtctctactaaaaatacaaaaattggccgggcatggtggcacatgcctgtaatcccagctactcgggaggctgaggcaggacaattgcttgaacccaggagacagagattgcactgagctgagatcaccgagatcacgccactgcactccagcctgggtgacagagtgagactctgtctcaaaaaaagaaaagaaaaaaaagaaagacactacacactaataaaagactcagtttatcagaaacacacaataatcctatgtgtctacgcacctgagaacagaggctcaaaatacatgaagaaaaaagtgatagaactgaaggatcaggcagaaaaatccatagttataggtgaggacttcaccactgctctcttagttattgatagaatcagttcacagaaaattagcaaggacaaaggagaactgaacaatgctgtaaaccaattggatctaattggcaattatagaatacttcactcaacaataaggtatacagaggatacatattcttttctagtgctcataaaacattcaccaaggttgaccatattctcagtcattttaacagatttacaaatttgaaatgatacaaagtgtgctctctgactctaatggagatcaactagaaatctgtaacagaaagataactaggaaacactaaaggttaagtaatataagtaaataatccataggtcaaagaggaaattttatgggaaattaaaaacatgttttgaactgaatgaaaatgaaaatacaatgtatcaaaatttgtggggtacagctaatgttggagggaattgaatagcattaaattcttacattagaaaagaagaatgggtaccccatttaccctaatgtgattattacacattgtatgcctgtatgagaacatcttatgtaacccataagtatatgcacttgctatgtacccacaaaaaaaagcaaaagaaaagagggttgatttttaacatatagttgattggcatgctggactcaaatcccaagcaagatgctaggacaaatgactaatgagttgacctgaggaaatttaggaaaggaagcagtggtcactaggaattagcctgagaggagtaagagtaagtcatggggagggtaactgcatgttgtttttttttttttaaatcaggccactaaacccatagatcagggcaggtagtagaactggtgaatgcgcaaggctttgacgagggttaacaatgactttctgggagatacatggagaagtgtgggaggtatcatggggatgtatcattagaatgagtgaacctgggtaaataacgttattatacattgggggctcctttctgggtaggggtgggaaatggtttatgatattgtgctaggtgggccctgccttgtttactgatggtttgagtaataatcagcattataatctcatatttgaagatgatcaatgtgctccattgagaacccatcctttgacttctccagcatcctccctctcatggacccctccgctttcccatcaccctgtgctgcctgcatttggctgctcttagccagtttccctcccctcccatctctctttgataatagataaccagtgggttactttactattgttcatttcttcatcgttgtaaatatttaaataacattttacaaaaacaatttggtcattttatacatcttatttaagagtaattgctaacactatccttgtcactaaaaatggtgtgtttacagaatttcccaagacctgaaacgatttgtttcccagaaaatatagtaagaaaaaaaagtaggatacatatacatttacatttgtgtatgttcacatatttacagttttgttaaaaatgcctatgtttgcctataaaatatcaaaaagaaaacacatacaaaagttgggaaaggttttgactatttcagatgttttttctttagtaatttcctgcattttccaaatggtcaactttcttttgccagtacccgtattagcctctgactgactgattttccacactagaaatcagtggctccaactttaaaaagtgccctagtgctcaccattttaaagtgaatcggtcttaagtgcggtggcagtggagggaatcaggggtgacgttgacttgctggaaaattccctctgaatttgtagtttgagtgcaggaagatttgaaaaccttattcaccccccacccatctccaattttgtttatttattttgagagggagtttcactcttgctgccccagattggagtgcagtggagcgaccttggcttacagcaaactccgcctcctgggttcaagcgattctcctgcctcagtcttccgagtagctgggattacagacacccaccaccatgcgtggctaatttttgtgtgtgtatgtgtgtgtatatatatgtatatatatatatttaaatagagatggggtttcaccatgttggccaggctagtctggaactcctgaccccaggtgatctgcccacctcagcctcacagagtgctgggattacagacgtgaggcactgtgcccggcccaattttaaaaactggttttatttataccaagtttgttacctgatttcatgtccaccaaaccctctttgtgtcctctgagaattttacttactggagtaacagcaggaaaaagatccactgctagactgtttattcaaagttaaaactggcacacaagtgaaaggaagattggccatttgtcatggtctgttcccagagtatcttatttcttcccaggggtttatctttagaaggtgataatcttcctatcttaacatcaaggactgtgggcctgcccctttgaggtatgtgtcccttagtgtccctcgctcttccaagggaaacttctttaacctgggccttgctatctcctcggtcaccctgtgggtcctttaccatatcctgtgagctttattagtagaaatgaactctaatttgtttaaaatgatctcttcttgaattactacaaacggcagttcattcttaagaaaacactgtaccgtagtgtagtacattctttaaactgatgagacttggtctcagataccttttatgatttccacgtctgaacttgctgggaattatttgtagattcttggctggattatattctgcttcagagttttgcaaaccagatgagtggaaatctgcaaagatttagtagaggtatttcaccaatgaccctaggcttcgagtgcttttgttgttgttgttaaaatgtgaagaattcagtactttaagttgcgtggatattcatttttactgtcctttaggctcctcttctcttttcacattatacctcatcttcatgtggatcatatttattttcaaatacagttaagggattaacccaggaataaaacaagtcaagcactgatacttacaggaaaatcgtgttagttttgttctgccacccaaagactgacctaaaaagagaaagaaataaccgccattcacacttagttattttctcagttgtataaatttcagatacagcccccttcagctctcagcacatccctcaacctttattgtttttttagtgaaacaccagtgtacattttacctattgccatttgctgtggatatrtgtattaacacttgatttcttaattaattctttatggtttagattttcagcagagatttttttttgtgtgtcatcagggagtttaataataaatatatttaattctagatccccattattatgtattgatctgttttaataacctctgtgcaatctgatgcaaatatccctccattgtttcagtctggaagcatgtatgtggttagtttattgaggtcaaaacatccttaggactatgcttctggcttggtcataatgcttctgccatgtcttggttgtactgtaatcttagatttaaaaggaatgacatattagtacccaggatgctgacctagggagccacagtcaaataagccactyttgtttgccactagttggccattctcctcatctcatcagtcttttagttgctttctttgtcccccaattccttgggattcaacttgtatcctaggtcacctctccctcttctaataggagcacccaatgtctggcctgggagagcaaagtagggtgactgaggagaggtattgggatggttcatctgggctgaggaggtagagaagaggtgcagttcctgggggagcagcttagggctcccactcatcatcaccacgagggggcctgcaggtttcacctgctcaaggtgccccatgtaaagagcggagattcatgtcatagacataaattaacctgagacggcacaagtagacaagcaaattctggtgtcctggttgaggatcttgaagctgcaggagagaaccccagctccacaaaccccactgatgaccgygatgtgaacacaccatcctgtttgtgcacagtggtaccctgacctgacccagctcaggagttcttaggggtcggttccccatcctgcaggactctgaccttggcctggtaccctcatagtgtgtgtgtgggtgattaacgtgcaccgtcttccgtgcccgagggacgtctgagcaggtgaaagcagcaaggatgggaaagcccctccaggtggaactcttcacactgtgcaaatatataataaccttagaagagttttacttgaggaaggcgccttttccagtttgcacagaggcacatcctgggccaacagcaacctgtacacaggaaagcacaacttggtgtaaatatgctatggaggaaattcacctcgagagtgagggcccagaactaggaaatggattaccaatgccttttaagttcttcctcaatacctagtctttggaggggccaggcatggtggctcatgcttgtaattctaacattttgggaggccaaggcaggcagattgcttgagctcaggagtccgagaccagcctgggcaacatagtaaaaccccatctctacaaaaattaggtgtggtggtgtgtgctgtagactcagttacttgggaggctaaggcaggagaattgcttgagagcctgggagccggaagttgagctgagattgaaccactgcactccagcctgggcaacagagtgagaccctgtctctctgtctctctctcacacacacacacacacacacacacacacacacacacacacaaacaaacaaacaaacaaaaaccacacaaccaaaacagtctttggagggacacgcaggggctccattcttactttctccacttgtgaccctgggcatgctacttaacctctctgagctacaatttcttcattgttaaaatggagataattgaggcagattcatttgtttgtaggtatgaagcttatgtgatttgggaggccctcttaaaataaaagaatttttaaaaattgttcggggtttgcaaatttttcaggcacatatagttatgcaaacacgttgaaaaagagctttctggtagaaggaatagtatatacaaagccaaggaaattcaaaacagcaataccggtttagggaaaggaaagtaattctgcatgacctctgaggtaaggagaatacagacagcagtgttatgcagccatgaatctcagccttggccgaacatgagaatcgcttggaccccgctcccaaagatttgatgtcattggtctgcgacacacctggccactgggtttaaaaaaaaaaaaaagtctttccagggctgagacaggaggatcacttgaggccaggagtttaagactagcctgagcaacatagtgagaccccatctataaaaaatatatgtatcaaacaattagctggatgtggtggcacacacctgtagtcctagctactcaggaggctaagatggcaggattgcttgagaccaggaggtcgaggctgtggtgagccatgatcatgccactgcactccagcctgggtgacagagcgagaccatctcaaaaaaaaaaaaaaaaaaagaaagaaaaaagaaaagaaaagaaaaaaatcatcccaggttatccaagcatcctgctgaggttgagaaggctgatgtgaaaccgtggttctccaactttcatttgcatcagaaccacctggaggactccacccctagagtttgtgattcagtaggtctggagtgtggcccagtaaattgcattcctaataaatttccaggtgttctaatgctggaggttggggactatactttgagaacaacttgcctagctgctagcatgtgatgttgactaaaccccgactgtgtatcctgaagacagaaaaacagggaaaacccttagaacaggtttagaaaaataattgtcccaagagtagcaggaagtgggaattaatgtgtattaaactgttagcatgtgatggtacagagtcaggtggtatgtggaaatagcccatttaacactctgggtaacacacatcatccctcaagccacgcaggctcctggtcactcctgtcacctctaggtgcagaaggtcagtatattctcctaactccaaggctttgctgaagcggccatccttatatgctgaggctgggagagggtagttttctattaatcccattcatatagctctcctctctgaccttagcccccacattgtcagcaacggcctatggtggaagccttgtgtaaataaatgctgtgcctgtgacagagaacatccaaatgtcccttctgccctattattgcagctgcttaagagaggttatgctggcagttggctggccttaaggcgtcctgaactctttctaatgctaaaccttctccctgcctccctctgtttctccccccacctccccatctcaggaaaccatctgtacctagctaccttaattgacctcagtggatctcaccacggttctcttcagatctatggtatcatctgccataggccctgttgtctgttgagagttgctatctgttcattcattgtaagcatttttttttccctttgtatctttaagcatggttttagacagctgccctaaaattcttatctgctgattttggcacctcgttcatcttttggttgatctcaattgattaacttttctcttgatttgcatcgtgttttcctgtttcttatgtctagtaattttggtttatatcctgactgttgggaatgacccattctagaaactgtggatgctattacattctcccataagtattggttactttttttttttttttttttttttgagatggagtttcgtctgtcacccaggctggagtgcaatggcgtgatctctgctcactgcaaccaccaccacccaggttcaagtgattctcccggctcagcctcccaagtagctgggattacaggcacgtgccaccatgcctggctaatttttgtgtttttagtagattcgggggtttcaccgtgttggccaggatgctctcaatctcttgacctcaagtgatccacccaccttgaccttccaaagtactgggattacaggcatgagccaccatgcctggcctactttttgttttagtagtaagtcttgactgagctcaaactcaaaactctgtcttccctcagtgggtagcagctgaaaatttctgtttagttttttagccttacgtggactctttggagtctgctctgtgcatgcatagttcaggagtcagcaagaaatctggaaagtttacgtgtagattgggggccgctatgccgtagagctcactcatctttttctcttagkctgttttctgttgctgtgacagaataccagagaccgggtaacttataaagaacagrtgattatttggctcgtgtttctggaggctggcaagtctgagagcctggcaccagcttcagtgagagccttcttgctgcatcataacatggcggaaggggaagtaagcacatgagacacaggcaccaggggctgcactcacartatagcaacagactcttgtgataactaacctgctacygcaataacaacgttaattcgttcacgagaactctgccctcatgacccagtcrcctcttactaggccccacctttcaacactgttgtcttggggattaagtttccaatgcattaactatgggggasacattcaaatcatagcactcacctttcagcttctagggtagcttcaaactctgttctctggttctttaagacagtaacactgatgatacatacatactaagttttagctccccttcatggtgtagaatatgtcttgtccttaagcaaaaagctggataatgaaaaactcactcattttcattttcttcttccaagtgttgaatttttcatgtttttatttatttttatttttatttatttattttttgcctgcatttgtatattctccaatgtctgcaagcagttttttgtgtatttgggccaggctttatggttatctgtcgaagattggtctgataagagatactatgctgttatcggaagcagaactgacgtgtacttttatagcatttgccaagaatcaaacaaaactaaattgatggccacatttgccgagagttaggctcagatttagtcccttcattctagtctgactctgtcatcagtattgggagcctctgttcaattctgaatcttggagggtttatagaagattgccaactaaagaaaccttcctgaacaccctcctattccccatcctccacttctctgagttactctatcctatgacctagtgttctggtcttcatagtatttgtcactttatgacattctgtgtgttcatttactttaaaaaaaatcatctcggctgggtgcggtggctcacgtttataatcccagcactttgggaggccgaggtgggtggatcacaagatcaagagatcgagaccagcctggccaacatggtgaaaccccatctctactaaaaatacaaaaattagctgggagtggtggcaggtgcctgtaatctcagctactcgggaggctgaggcaggagaattgcttgaaatcgggaggcggaggttgcagtgagccgagatcgcgccattgcactccagcctggtgacaaagcaagactccgtctcaaaaaaaaaaaaaaamcaaaaaaacaactctttctttcttttagaacctaaacccataaagacaaggaccttatctgtcttgcttctcattttattctctgtacctgtaaatctttgcgcatagtaggctcttggtttctattaactaaattggttcatgcttcatctaactatcttactgagttgtaggacatttatccatacctgggaaggctggaattggttgagtatcccaccatttgtgacattttaatttataatgtaactgtactaacaactgcctttgccagatatttacaacacacacacgtgcactgtaactcaagaaatccacagaagctctcccttcagttgagcaaatttcagtggaatacctattctgggtaagctatgaagcccatctctgtatattgtgtaagatctgaggttccattggtggtaggaagtacacataagacagggttccggtattaaaaaatctatttaggaaaacatatctaaaaataggtgagtgagaactttgaccttgtttttaaactctgtttttcaccgttatgaggaaggtgatatagtgaggagggtggtttccaggaaaaaaaaaaaatacagctggcaaatggataaatttaagtatattcgagggcttcagtaatgtaatgcagactgtgatccacttaggaattaaaatctactaaagatttctgtcaataatttatcaactattttaagttggaaaacaaattcataaacatgttaactttttttttaacagtgtaaatttaaagtataagcatttccccaaccctggatctcccaggccccctgtgccataggcagcccccatctattaacagttacaatggatgcacagctgtgcacgcatctgtttgtgtgtgtgtaccctcttccttttgaaaaacatagacacatgctgtacatacttatacttctgtacataaatacatttattagcccatgtaggtgtgttgtgctttttaaaatgattgtgtcgtatttcattacactgatacattgtaatgtatttaactagtcccctatggaaaaacattttatactgaatacataataatttgagactagataaacatctgtcaaagaagtaggaatgaaaattactttcacagtgtttttggttatcttgaaaacctgagacatcttcaaatgccaggacatctctcatgctgtcattcatgacgtaaatatatgagcaaaaaacagaatgaatgaaaaacaggaccacagactattgacagttacttcaactgtggaatccttttattgtttatttagttcctttaggcagttgaatttcattttgcgtgcacagcaatcatattgacttatgctgcaaaatagttttaaataatctcttatacagaggaaaacttttgtggtgctggagtggagcttagaattctctattatggcatttttaggtcatttaaggttaacccactaagtaacgcagtgcagacagcgtcgttgaagtggcagcttgggttaactgtgtttccacctcttctgaattacatcatttttacctgtcattaactcagcataatgtagcacaaattgattttcctaatttgataggttaagttctttaaaataataattaggcatagcagtataggctgatttgctacaaaatgtgttttgcgttgctgattgggccacacatgattggcaaatggaggaactatgtctctacaaagtggaggttacattgtttcaaacagtttccccagtatgttaatgctttattttaccaagtaactggagctgcaggaaaatgaaactaatatagctgaactcatgaggtgtggaggaataagctaccatttatgatgctttgtcttggaggttcttggggtgggagagattcggggagagggttctctttgatctttgtgcattttgttcttacctccgtaacttcgtagcctcagccctcccctacaccttccttcaagctaccatcactctttttttttttttttttttgagacggagtctccctctgtcgcccaggctggagtgcagtggtgcgatctcggctcactgcaagctccgcctcctgggttcacgccattctcctgcctcagcctccccagtagctgggactacaggtgcctgccactgcgcccggctaattttttttttgtatttttagtagagacggggtttcaccgtggtctcgatcttctgacctcgtgatccgcccgcctcggcctcccaaagtgctgggattacaggcgtgagccaccgcgcccggcccatcactctttttaaaggtagagacccagtttaactctatttttcaaaaagtaaattaggttttctgtggctttgcagctgtgcccgtgtctttgttagaattgctattgcttgtgttaatgctgtcctaacagtattgtataggcttgccccaaccctgtctttctcatgagccttgttattattagtgtgcacttttgcctaatgtgtcgtttttcaggaaaacacatttctctttggagcagaggtgtttctgttctatagatatagatagcattgaggtgctcaaacaactggacaagtgttacttagaatgcgatgttgaatagagacagatatcagactgtttcttatgacttgctactttccataagaatagaatggaaaatgtgagaactcgtgttcaacttacttgatgaagtatagcatagaatctttgtcttaaatattaataatatctttgactcaaagggtagaagtgccattttttttcccgaaaaaatgccatctctcctgggatctcctttactgccttttcgggtgtagatagatattcagactttaaaacgatttgttaattctgcatgataacaccatgtgccacctcaagccacattgtcagcatcgacccactcatttctcactttttattaaatttgttgattgggtatgaaatatgagtatcctttgaagtattcctgctaatatgtttttcctctaattcatgccaaaacccgtgattttttttaaagtcagaaaatacttctggaaatggcttaccaaattctctgttaataattttatagccctctgccagggtgcttgtacacctctgaaatccctcattggcttcatcttctttactagactcagctccttgagtgcagggactctttctttttggacagtatcatacattcctggaaggaactaaatacatgttaatcaaaagaaatgttgaggctgggcacggtggctcatgcctgtaatccagcactttgggaggccaaggtgggcggatcaccagaagtcaggagttcgagaccagcctgaccaacatggagaaaccccgtctctactaaaaaaatacaaaattagccaggcgtggtggcgcatgcctgtaatsccagctactcgggaggctgaggcaggagaattgcttgaacttgggaggtggaggttgcagtgagctgagatggtgccattgcactccagcctgggcaacaagagcaaaactccatctcaaaaaaaaaaaaaaaagttgactagattctagcattcagatcctagcccacaaaagagcattcaaatttctagtcgcagagaccattcaaaatgtatccattatgttataatgagaatgagttttttctagggtctgcacgccagagatcttaaactgaggtgggcgtgtgtgtgtgtgtgtgtgcgcacacacacagatttttcatattctgtataaggctgttttcagattctatgaaaagcgctgggtgaagccaacatttaacctatccctgttcctcttcatctgttctattcatcacccaactttccagcctgacccgtaccaatctgtgagtttgtgcctggtattttgaatgcttgacactccttaacatgtgtttgtaaccttgtggctgggcttgttcacctgaatccgattttctgtttctggtttgaattgtggttgttccctggaaccaaatctctctgcttctgacattagtgcagcaacctagtctttccttcctacttttgtccttttttttttttttttttttttttttgcttggcttcagcgttttcaccttggatgtgtctgatcccaaagcatcctgctgttgctcaacagtaggaattgcccaaacttagttcttaacagattctgataataaagttgaacagcatccgcaaattattggctttctaaaatcctaattccttttgggtccgaaaataggatggcatgtgtcataaaaaaataggtagcattttcttatttataactttgctttcttttttcaggccacatttaatgctggatgactgagtgtggcatggttgtccaggaagtgtttgttcgagtgagcgattctgtgatgctgggatgattcagtttgtttgtcattgaaatgttcatttcatccaagaccgaaaaatagcccataaaagagcattcagatttcccttatgcttcactttaagggcagcaggttctctttggcctgctaggttggaagatgataagcattgctgaagttgaatgtcactgacatataaagacttgtcaaaggatagctcaagtatacctagaaaatgatcaaatattagagccgaggaaactcagagaacattttccaaccagctccatttaatagacaaggatgtgaaagtgtagactgatgaaggaagttgctcaggattcaacccacagctggctgataaggacctggggccaagtcagactttcatagtcacaaaatggtgtatagccagttgctttccactgcctttctttacgcattaatgggacctcactttacaatcaacaagaggacaaagagcagagcaccattttttaagaaattgcgattgccttactcagtttcattggctcataagggatcctttgccttcttgggtgcagtgaccaagactgggtagtccctgagcccacatgtccatgggcaggggtcatggggatgtcaagggctttctcttgctctggcaaagttcacctctccattggcctccacrtcaccatggggtggagtggagagagggcccaggggctccagaaagagagtctcaccctcctttttccattcccttggcaccagcactcacagcctgatctcccgctgatgtccacctggagtcaccaggattgatcctcgtctacctgggtccacatagactgccaagactcgtgccccaaaaccttaacaagcacaggtattttgtgttcactgctgtgcctctagggcctaggtcagttcctggtacgtagcaggtgctcagtaagtatttggtgaatgaatgaatgaggacctggctgaggatagaagcctcttggaatcactgagtgtcatgcatataacaggcaggctaggacccacaagaacatcacagacctggactgtacttcccacgttgactttgaacagtgggtcaacttttgggagtcatttctgctgtcctcattggtaaaatgagaataagatgctatgatctgtagagtccgtttcagctttaaatttgtggttctgtgctcctcaagcatcarcagaatgtgacttggaacagctttgtcagcatcagacgtagcagtgtttattccccgggtcctgcctgtcagccatgtggcctgcccacgtaaaggctggcacctccgctgtggcctctccctgcatctcccacgtgcagttggcccagtctctgtccgttggaattagcttgagttggttataataggaacatcccaaactgtacagctgtaaaccaaatagaagtcttgaaaaaaatcagaggcttatttttcatttacagagaagtctaaaaggtaggaaagctgtgcttgccgtcgaggacccactgtcatcacaccctccttctccctcactgctccatgacacatgggccattatctttactttctcttcttttttttttctcttgagatggagttttgctcttgttgcccaggctggagtacaatggcgtgatctcggctcaccacaacctccgtccggttgtagctgggattacaggcatgcgccaccacgcccagctaagttggtatttttagtagagaaacggtttcaccatgttagtcatggctggtctcgaactcctgacctcaggtgatccacctgcctcggcctcccaaagtgctgggattacaggcgtgagccactgcgcctggcctgtctttactttctaaataggagaaggaagaggctgtgtctccactcccctaactgaggaagactttccagaaatcaagtcatgaacgcttttgtgttcatctcatcggcccaaaatagagacgatggccgcatctgagtcgaaaggaggccagggaatataatcgtttggtggaatgttagtgtgctctgctgaaaatcagttggtataaaaatgagcttgtcctattgatttccttgtgctgtctttatttcgctctggtttgaagggtttaggaatgaattgagctccacctcaagggttcttggagtcatttgagtggatgaggctgaaatgacccatttgttccttgtctgggtgcaaagcttgcctgcaaggctatctgaaccttatcagataaggttcaaataaggttaaagtctatcccacacaaaaccaccctcccctaagattaggcaaaacgatagggagggtggttttgtgtgggatagattttaaatgctgattaaacacatttcaccactaaatcttcacttttgaagcttttttttttttttttttggtcagtttgagcaatttttatgtttctggagatttaaaccaaaaaactcttcgttttcgtttccagtacttgtcatttgtgcctttgtttggtttttcttgattagttttcccaggggcttgtctattttatgtttttttgaagaacctctattagttttcattaaatccctctattgcttatatcttttgtatttatatgaaaatatacatatatttcttgttttctattctctttggtttgtttgctgtgtttttttttttttgatggcatcttgctctgttgcccaggctggagtgcagtggtgcaatctcggctcactgcaagctccacctcctgggttcacgccgttctcctgcctcagcctcctgagtagctgggactacaggygcctgccaccacgcccggctaatttttcgtatttttagtagagacggggtttcaccatgttagccagaatggtcttgatctcctgaccttgtgatccgcccacctcggcttcccaaagtgctgggattacaggcgtgagccactgtgcctggcttgtttgctgtgtttaaaaaaagttgttttgttttttgagggagaaattagtatagattgcatggtcaggtggattttttaaagaggaacataagagcaagatattcgaagtgtgaggaacggtatttgtgacagggttctctagagggacaggactgataggatagatgtatatatgaaaggaagtttattagggagtatcaactcacgtgatcacaaggtgaagtcccacaataggctgtctgcaagctaaggagcaaggaagccagtctgagtcccgaatacagccttcactctgtggccaaaggcctgagagcccctggcaaaccactggtctaggtccagcagtccaaaagctgaagaacttggagtctgatgttcgagggcaggaagcctccagcacgggagaaggatggaggccagaagactcagcaaatatcactcaatattaaccatcacagtacttcacttaggaagtattttgaggcatcatctacatttatagcatattagacactgaaggaccgaaacgtgtcatgaaatgcccacgtcccagagcccctgatctacagaaggaggtggggacaaaacatgtactgctagagtagagtggagaaaacaaaaaatagaatgaatgaacatcgagaaggcagaggtgaatcgtttgcaagaaaggtttggcagtcacagaggacagaaaggtaaatgtgaggacagcaagaatgagggagctggaggcactggggcaggagcgaggcgtcctatcagaaactgtttttatcactgactgttcagtccttcatgtcagctagatgttctcaactacccaaatccactgtagataaaattcttcaagacatgacagagttaactcgcattttctctgttatcagggcggcttttgttacayggttgcaaacctgttctacacacctgctttgccaccttcacttcctgacaatttctgatttccacttcagcttctggagcattctgtctcctgcccttccttttcccttcttcctagtggactcttcatttacctctgcctggcttctaatctgcctcttgtcccaattccccatttccatgtgttctggccccagctcattctgttcccgcagacctgatttctcaccttatttcctgttgattccttctcagctgtagcaggcatgcctcagtctccccaaggcaggctgccttgtggcttggcagaacaaaaggcaggtggggaggaggctggatttagaaacaagtgccgtgtctcctggtggtgatgagtagccttgcaagagcccttcccagatgacctcagtccagatggagatggcacaggagggtgcaggaagaaaactgcagtttcaaacagcttctgtaggcacaccaagcagggagaattagcactgctagctacttatgaacagggatggcataaggttggcttgtactgagagtggcctgatctgttgtggtctttttttccccaaagcgtaccatacccctgaactaagttagaatgatatcatatagagagagtttctaaccatttttcccccctttgacaatattatgacaggtatgcagaaagattaatgtgtaagatgttgatgggtacatcatttacaacagtgaaccactggaaacaaatgtccactggagaagataaaagaatgatgatacagttagtggtttctgacacaactaataaagaaagtgaggtggacctacaagtagatgcatagaaagatctctgagacatgctctatggaagacatcaggtcacagaacagtgcagaggatatgaacccgttatgccaaaaagaaacagtgtcttggctgagcgcggtggctcatgcctgtaatcccagcactttggaaggctgaggcgggcggatcaccttaggttgggagctcgagaccagtctgaccaacatggagaaacctcgtctctactaaaaatacaaaattagccaggcgtggtggcgcatgcctgtaatctcagctacttgggaggccgaggccgcagaatcgcttgaacccaggaggcggaggttgcggtgagccgagatcatgccattgtactccagcctgggcaacaagagcaaaactctgtctcaaaaaaaaaaaaaaaaaaaaaaaagaagcagtgtctctatgtccacacatgtctgtatatgtatatagatatatatagaaaggacaggaaggggaggctttaggattactttaggtgttcagcagtagaagaccaccttgcacactgggtgggtaaaagaaatctgctcagcattgttctttcatatttcacctcgagctttataaaccctgycagaggaagatctctggggccaggagttcaagaccaacctgggcaacatagtgagacccccatctctaaagataataaataaataaacaaacaaacaaataaaccctacaatggacctttgcaaagagaaattagtcctttgttgtgtaagttgcaaatattttcttccagtctattgtttgtcatttattataataccatttatcttgtagcaatgtaagaaaattgtgtcaggaagtctttctttttttcattacaatttctaaatttggagtcctgcttgggaaggcctttctcaccataagattctacattatcttcattttcttcccctgatgtttttttcagcattttattttttttacaactaatttaattcatttcctatttatttttctgggtgggtggtcagagtaatggaacatatccaaatggatatccaattgccccaaaactatttattgaataaccaatggacccagttatatttattcccaattcccatacttctttggactgcttattaaaatttgtctaaaattgagtgtctgtctacagaagtccaattaagtgagcgattaatgttgaagatttgagaaacacttgtgtgatgaagygtctagcagagctctggcactaaatggaagatgttmttgtaacacagaaacaaaaataacagagacagtgtggatataaggctttgaaatgcgttgggcagggtgtctggataaaaaagtcatgcttgtggtcgagctccaggtaaggccctggattgcaaaaggcaaaacaacacaaaaccctcaatctgctttaagaaaaagtaagcttcttaaaaggactcagcagtagacattcttagtgatgctacaccctaatgatagccggtatccccgcaatgggagataaaccactgttgggagccaaggcttctccatagctgaggggccacatctcctattttcttctgtctttctgtcctcaccacctgtattcctgtagatttttctgtagatggtccattgaagccactggcccttacaggtctagccccactaactgtcctctcctattttaaaatcccaggggaatctagtaaactgtgcatcctaccttgttcaatcaactctggcttcagggatgagagttgtcacattgtctctggggtggctgcttccagaggttttagggcagatgaatctcaagtctgttgagcatggcagataaatacccttcttctctgcttccctacaggtaggcttagaacaataattttctactattttttaaaagcagtatgactatatgtaggaaaatatcggaagttggccctaggcaattgtgaaataagggaagtttatttttgcatgcctgtcctcactatctttccccatagaagtttttatttggggattgcctgcatttctaaacttttgaaaggctgttataacatacgggttatgaaagtgacctctgaggtcagactgggttcctaatctgcttctccaagctttgtgaccttggacaagttttgtaagcttgccaaaacctcaatttccccatcaataatatgatgttattaatagtcctgacctcaggggttgttgtgaaagttaaatgaatgtygagctttaacaatctgatgcttagtgaaagcttaatgtttgttttggtgctttctaatgaataaagaccctgatcatgataatgcattcttgttgctctttctgtgtatccctgtcctttcccacattttgagatttactttctgtagtttgtattctgaaaataatatgtcattagaagtataatgaacatacttttttcaagcaaaatttctctcttcccacctcttgccacattttagatatatataaattgcctcagcactttaaacctcaatgacatgttgctaattagtgcaaagccattaatcatcatacagacctctgttccaagtccctggcaatccactttcgtctccttctcctgggtgcttgttcatgtgcaaggatctggttaaatccttcctgcttaggccgaagtggctgatgaggtctgcgttagttcattttctgttgctttaactgaacaccacagactgggtattttataaagaataaasagggtaatttataaagaatagaggttgatttagctcatggttctggaggctgggaagtctaagagcatggaactagcatctggtgaggcccttcatgctgtgtcataacatggcagaggrtgttacatgcaagagagcaagagtgtgcatgtcagctcaagacactcttcctcatcttataaagccaccagtcctatcatgggagccccatcctgatgaccttatctagtcctaattatctcccaaaggccccacctccaatcaacataatgaatttgggaattaagtttccagcacatgaaagttggggaagaaaaagatggccttcccatgcagttgtcctggtgaagttattctattatggtagaatagcttggagctagatgtcttttataggaaatgactagtgaccgtattttccgtaacaggataccccaaccaccacaaactttattgcttcggttgcccatgttatttatttatttatttatttatttatttatttatttatttatatcctgccccattccaaaggggacttgcagatttagttagcagatatcactaggtgttgctaaagattatgtctgatttgggacaagatctgcttttggggacttggatcactaataagctagaccaccttagccactattagtggcttgaggattggctgccactaatcctgctcatccccttaccactgatactcttgtgcaaggaacccagtaggttcttgtatatgtatattttgagatrccagcatttactcgcagttggaaggaagaacaggactaagtcttatgccaagtctgtagtaagcctttggctaygtattagtccatagtgtgtgggcacagaaatcctgtgaatggaaagttccaaccacgtctgctattctgaagacacccaggtcagccaaatatgggaactgtgtatatagcaaccccatctccttccctttctttacctaccctgccctctgttagtcatgtggactctaaaatcctccaaccacacccctactcactgtcacctcagttacctgggatggatgattaagaaagtctgcagattactggctgcagttgtgaccacattggcttggatcttgcaggtgtgcaaggattcttttgtatctgtaagcatgaggtcagactaaatcaaccttctcaggcccttttcaaaaagtttaagtccacagccttatctgggcattttgggttttaccttgaaagtagcaaaagggggcaaattaggataaactaaagaaaaataactcccagggataggaagctcttacaggtttgtgggctgaattgtatctcccctagaagatgttgaggacctaatcccccagtatctgtggatgtgagcttatttggaaacaaggtctgtgcagatgactaaattragatgaggccattagagtgggcctttgtattagtacattttcatgctgcttataaagacatacccaagactggataatttataaagaaaaagaggtttagtggactcacagttccacatggctggggaggcctcacagtcatggtggaaggtgaaaggcacgtcttacatggtggcaggcaagagagaatgagagccaagtgaaaggggaaaccccttataaaccatcagatctcatgagacttactaccacgagaacagtatagggaaaactgccccccrtgattcaattctctcccactgggtccctcccacagtgaatgggaattatgggagctacaattcaagatgagatttgggtggggacacagccagaccatatcagctttaatccaatatgactgtggatccttataaaaatgggatatttggacacagagacagacatgtgctgtgagaagatgacgtgacaacataaggagaatgccatctacgagccaaggaatgcttgcagccaccacgagctaggcgagaggcctgggacagattctccctcacagcccttggaagaaccaaccctgctgacaccttgaatgtagacttctgggctgccaaactgtgtggcaataaatttctgttatttaagccacctagcatgtggtacttcattatggcagccatagggaactaatacaggagccttttataagtcctagatctgccccctttttcctggcgtgaaccygtttctccatcagtcagtgtgaaaagccatcttctcatcatcacttaagatttcgagtttgctttactgcccacattttggtttggcgctgkggcctaaagattgtttcctgactcttctgttattctctcttaatatttcctgagatgtctcattgttattcttgttgagtcatatctgccatcttttgctgttctataaatgtacccaggacttgtttggagcaggtataatacacacasatgcaaaaacgattgccaggaaggaagaagtgttttattacattcgcagtcgccaagaaacagtaagcacatgagcccattcagggccacacgggaaagcaccaaagccacatgagcaggcacggaaagagggagctgcacgcattagccttgattgcagttaacaccgaaaggagtgggcaaagcaaagtcaacacgtggcagaagttcactgtcaagcttaaatctctgtggttcatgaaaaaaaaatttactatgaagcaggctctgggctataggggtggtccctagttgtacctggctccgtggagattagggcagaagaactgcctagcagaaaagcagactcctggagggctggactccaagtagttggttggcatatcaaaggcatgcccacaagtgagttacttgttacctctaggaattaattaatcctgggaggggcagtttcttkggtccacagactccaaatgccacagcatcaagaatatagaaagtaggaaaatataattaatacattgacattatccagctgttcagttttatatagctattcttccctycccacttcaatttatactttaaagaattccttataaggtcaacaaggctcctgacaatagcatttgcgatataccctcttgtctcttgtcagataactgtctggaaagtgcaggcttgttatatagcaccctctatccatggattttggctgttccatttattggtrtttcctctttcttcaaaagctgtgaccttcagagggaagcaaagttggaatgtcatcagtagcctaagttttatctccagcatttccagtgctaggyaacatggtgaagctctatctctacaatatctacagatacatctattgatatatccagggttttttctggccctctcatttgtcctcatatagattggatatcttttttattttcctgcttattttccattccccatttctctggttatagcccctggttttcttcaaggagctatcccttccctactcttgagccgtgtggtgtaagtgggactaacttcaccctttgattcagggaagggatgtgacttgggtctagccaaaatcattgattcacrcagagcaggtgaatcaaattggaccaatcggtatatggtttttttctattctttttttttttttttttttttttgagacaaggtcttgctctgtcactcttggtgcagtggtatgatctcaactcactgcaacctccacctccagggttcaagtgattcttgtgcctcagcctcctaagtacctgggactacaggtacgcaccaccatgcccagctaacttttgtatttttgtagagatggagtttcaccatgttggccaggctggtctcgaactcctggactcaaatgatctgcccacctcgccctcccaaagtgttggggttacaggcgtgagccactgcacctggctaatttttgtatgtttatagaggtggagttccgccatgttggccggggtggtctcaaactcctgagctcaagcgatctgcctaccttggcctcccaaaggggtggggttacaggcgtgagccaccgtgtgcctggccatggtatattgtttttctattcctgctatgataaattatcacaaacttagtgactttaaaacaacacaaatttatcatcttacagttctggaggtcagaagtctggcacaggtcttaactgggctaaaatcaagatggcagcaggatgttgctgctctctggaggctctaggggagaattagtttccctgacttctcaggtttctctggaggcagcccactttgtttgccttgtggccccttccgccgtcttcaaagccagtagcactgggttgygctgtcctcataccacatcgctctgatccttctttggtcacatctcyctctgaattcctcttctgcctcctcttccactttttttttttttttttttwwtttttttgagatggaatcttgctcagtccccaggctggagtgcagtggcgcaatctcggctcactgcaacctccgcctcctgggttcaagcgattctcctgcctcagcctcccgagtagctgggactacaggtrcccaccaccacgcctggctagtttttgtatttttagtagagacagggttttgccatgttggccaggctggtcttgaactcctggccccaaatgatccactcgcctcagcttcccaaagtgctgggattacagtagtaagccactgtggctggccttcctcttccactattaaggacccatgggtgacactggacccacctggatcatctgcagactctgcttatctcagtgtctatctgaaccatcttcaaagtctcctttgccatgtaaggtaacatattcagggtgctgggaattaggatgtggacttttgggaggcggggcattattttgtctactacagtcagtgagattcaactctgggaccttggctgggtcccttgggattcctgagcagatgggctttcaacctgaagctgctgtcagccaccttggatctgtgaggggagagtctgccaaagaatggagtcaaccttaagaaaaacagacctgagagacacggggagcaagaccatgtctcagtgttgtccttagggccactaaggccaactctacccttgcacgttttagtcattgagtcaatcaattgactgccaccatcattacatgtgtcctcctcctgagttggtaacgcaggcacaacataaatgaattcctccttcattgtcctttggagcatagggggcagccttttatcaaaaacatctgcattgatgacccacagacagagtgtcatggtggcacattgttccagtactggaaattctgcttctttctttcccagggatcataatctttcaggttcttaccaggtctttcatctgtgaaatgatggggttggatgtacagagtgttcttggtatctacatatgaatgttcattatacttgcacgggatggctgagctggtagaatcctttttaagatgattggggccaggtgcagtggctcaggcctataatcccagtactttgggaggctgaggtggcaggatcacttgaagccaggagttcgagaccagcctggacaacatagtgagatcctgtctctataaaaatacagtttaaaaaaatgagctgggagtggyggtatacacctgtagttccagctactcagaaggctgaggtgggagattgaggctgcagtgagccatgattgtgccactgcactccagcctgggccacagagtgagaccctgtctattaaaaaaataaaataaaaaaaaaggccgagcacaatgtctcatggctataatcccagcactttgggaggctgaggcaggagggtcgcttgggcccaggagtttgagaccagcctgggcaacaaagtgagacctcgtctctgtgaaaataaataaataaataaaattaaaataattttaaaaaattaaaaaaatttttttaaaggttattgcacctaatttccttacttaacagatgagggaactgagacctggagaagctaagcatcttcactggagaatagactgcttggaaacagcccaacgagaaataagaacttctgattgctaatcctattatataccacatttctaaaattccttgacctagtttagtgaattcatgtaagtttgtttttccctacaatgtgtaaaaaatctaatgtcattcactgagataactcaagatatttgagtctcaatctgagaactgacataatatttagcatgccatcttttgctaagtgtatttttataaaataaaattattgtgccaatttcctcccattttacctctcacaagtggatagttctagaatctttttaaacccatttctaagatcaaggagagacctggagacaatactaaattcttgagcaatatgaaaattctgcatccaagtattaatcctaaaggattctagggagaagctggtctgagtccatgtccctgatttcttctggggaatagcacaggggacaaataaaatggtggctattcttatctaatgctctccaacataccacctccaaacttgtggcttaaaataacaatatttgttttcctcttgaatctgctatttggacagggctcagagaacaacccatttctctcgcattcaacatgggcttaaatgctggggctggtgtcatttggagttgtgttcgctcacctgtctgtccatctgtgctggccatcaactgggaccttaactggagctgatggctaaagaccctcatgtggccacgccatgtggcttggacttcctcacagtatggtggtggggttccaggactgagcatccatgtcacctaccctgggatgtcattactgtcacattttatttgatgaagcagtcaaaaagaccttccctggttcaaggggttagaaataaacttcacctctcgatggagtggtagcaagactctggtggtcatatgggctggaagtactactctggcaattgtgaatgaggctgggatttcatctaaaatggccagagatgcgacagtgctaagcttagtttttcatttgtgtgtatgatttttcttttcttgtcttctttggcaactggtgtgaattgagaggccagagtgttactctcctcaggcttagggtagccactgttggttttgaaggagctatttgataccgtcaaccacaagagattcagagaaggctgaactggaggtctgaattactccttgtgattaggacatgatgagtatttgcatctagtattcttccagtgcctcacctaactccgtcaacaccagcctacaagaaattgtatctcccaccatctgctgttgttctaccactcaacacaaatatctaacctgtacaagtactgagggatcacacgactgtgactaggcagagaaacatcacagcttgcttaggaagtcttagtaacacgaagttatgagcacaaactctaaactagaaaatatggcagctattgaaatagaactgaataaggagagagaagagtactttaacaaaatggaataagaaagataattagcatgcaaraaaataaaagactgtatggaactaaaagcattgtttccacaatataaaaactatttttttcagatgtgctaaaagaagatcactgctaagaacataatcactattctgaaagatgaaggggaagaaattctttttcccatagaataaagacacttagagacatgtagaggaaaaagatacgaaacttggaggacagattcactagacttaacatgaataacaagagtgcctcgaggagaaaaagagctagagagaagaagaataatagttaaataaaagtagaagaaaagttctctgagttgaaaagtcaggcaaggtgaatgaatatttcaaactacatgtatagacatttcctggtgaaatcctagaattttatggataaagagaaagttttatgcatctggagaggcagaattagaagaatcagactagtgccagatttctcatcaccagccctagaaagtagaagaagacaatagaacaatatctgtagatgatttatacaaaaaaaaattgcaatacacaattctacatcaagctcaataaccattttttgtttgcaagtttgacacatgaaggccttggagtttattactcttgtaacttattaagggcatcatggcctagagtttattacttgtgtaatttcactggggaaaacaattggtaaagtgtcaacatcagtagaaatctcaacaagccgaaaggtaagaggtcagaaatcagtagtgaggctgggtgcggtggctcacgcctgtaatcccagcactttgggaggctgaggagggtggatcacgaggtcaggagatccagaccatcctggctaacatggtgaaaccctgtctctactaaaaatacaaaaaattagctgggcgtggtggtgggcacctatagtcccagctacttgggaggctgaggcaggagaatggcgtgaacctgggaggcggagcttgcaatgagccgagattgtgccactgcactccagcctgggcaacagagcgagactcatctcaagaaaaaaaaaaaaaaaaggaaatcagtagtgagcagtgaatcttgtgatgaatatgtcatttagtataaggaratgagattatttttaccaggactttatactgtatcgtaagtaatgactattgcagcgaagtcattacttaattacaaagtaatgactgttgcagcaaagtcattacttaatgacaaagacaaactggaagtgaaaaccctaataatagcttgaagtcaaatctcaaccaaactcaagagtggggtgggagttgggggtggaagacactggaaaagtaaacatgttctaaatgtttcctctaatggatcaggggagaagactgaggaggcagagtagctggataggaggacagaattatctcttactaatatattagagaagaagttaaattatgattttaggggttggaagttcctgtatgaattgaattgagattttaatctcctgggtaaattgccctacaacagggaggtagctgatcctcagaaggcaacttacagatctgtatctcatcgtctgccttaatatttttgaccctaaatgaattgaggttattttgcttgtaagagttttacccgtaagttctaacctcaaaacacataatcagcaccctgcctttgcacyccacagcatcagcctagaccacagttgcctaacttcatgtgtggctgcatatctgctaagaagccttcacagtgtaagagagagagaggaaaaaaaaaatctaccctcttaagatctctggccggggccctggaaattagaccggcaaaagattaccaagagagaaacagagtttattaacatgtgcagtgtgtatacatgcaggagagagaaactcagtgatgagtaattcataggggttattggaacctgggcttgtacagcatcttagcaaagaagaataaatttagagagaggtgaaaagacaaagggaaaaggtttttagkcttctaggagctgtagaccctgggaaggtaaatgtgtgggggaaactcatactatcttagcagtgtttgtgcaggtctgtcttggtgctgacttttcatcttcttcatgtccgtaaaacttccccaagagaggggatttacggcagcctttacttctcaggagtttctgcttttgaccagataaggggacctctgagaaggcttctttctgcatttgttgattctcatttgcctacagctcaaaataatccttatccaaagtggcatattatagggtagcatattctgatcttctrtaacagtgtggyttggagattgattgagtcatacttatgaagaatgtggaattacagaaagtgagaggagagatctagtatgttcacctgtcactcacaaggaaacatgacaggtcacagttataagaaggaaccaactgacagttccagcaggattatgggggatggggaaggataccaaaagagaggccacaaagcattcacattaatgttttatctagacatggactcttctcctgtctcacggaggtgatcagggaagagcagccttccaagcaagctaacttttttatgagtccgtcatagccctgccctgctagaaatgccaggggtgggaggcatgtaaagagtaagtccctgtttcttgtcttggtcctctcaccaaagtgaattgtctccatagtcttgcttacaggaagcggggcaggcttcccaggggaaatttgcaagtcacaattgtgcaccaggatattttgtcatttcagcatcacagacttgcaccttggagacctatatttacaagctactttctgttggacttgatcacaggtttgtctttaaggacagtacccagaacattaggctggcaaaagactttgggagtcatggaatctatccttacacgttacacagagtcacacataaactccacccagggaatctttttttcaatgacagatatcaaggaaaataatgtgaaggagtgattagaaccctcttgggacacttttcttatagattagatgctattcgaccaggtttatgccatggtctctgacaaaccacataaatcttgttgaatagcacctaacgtataagaaaccaaaactgggagtagagaggtgatgtggttagtgcaggcaatgcttcctactctattctacagctccatgattacgttataatcaacccttataaccacaaaggtcccagagccctcagaatttgcagtgacaaagagacggtcgatgagggaggtgaagaatatgcttctgatgagtctgtttgggctgcaattgcaaagtaccagactgagagcgttgtgctacaaagactctttcctcctatttctggaggctggaagtccatgaaagaggtgtcggagggtcgttttcctctgagggctctctccttatattgtagatgccatcttctctctgcgtcttcatatggtcttccttttgtgtgtgtctgtatccttgtcacttcctcttcttatagggacaccagtcatactggattagggcttaccctaatgactgcattttaccggaatcctcttttaaagaccatatcttcaaatacggtcacattctgaagtactgggattagaatttaatatgaaatttttggggaacacagttcagtccttaccaactacagaaatcaaataaaaccaaaaccaccatatccattatattacattccaaaaccacatgcaagatcgtggagaaagtccattcttcacaaccctaatccatgtgcaataaactgagaggctaaaaagccaaaaagtcatttaaaaagtcatatatatgcattatatatatatatatatatatatatatatatatatatatatgaaatgtgtatatattttatttatttttttaattttttttctgagacggagttttgctctgtcacctagagctggagtgcaatggcgcgatcttggctcactgcaacctccacctcccgggttcaagcagttctcctgcctcagcctcccaagtagctaggattacaggcatgtgccaccacgcctggctagtttttgtatttttagtagagacagggtctcaccatattggccaggctggtctggaactcctgacctcgtgatccacccaccttggcctcccaaaggctgggattacaggtgtgagccaccgcgcccaacatatrtatatattaaaaatatgttatatattaccataaaagagcataaaattatttggaggacacaagaaatacatatttaagggtttggtataataaaagtaaagacatttgaggttaaaacatcttatttttgagaagaaagttttaagcctggggctcgaaaataaccttgggaaagattcatgttgttggagagactcagagagcagtgaagaatataggatttggattagagatttaaaaataatgtctagatattttggaacgagcaagaaaattcccattttaggacgaaggaaaaggtaacatttagagagaatctaaaacatatactgtgttttcataactcctcttacaaatgtagtcatttggttaacattagcaatattaagataagctatctataacttggtttgttcataaatttataacatgtggtatacaaaatattccaatcttcactattttgtcatttttwaatttttttttatttttacaactggaaaaatacatacaacataataaaatttaccatcttaaccattttcaggtatacagttcagtggtgttaagtgtgtttacattgttgtgcagccattgccaccgcccatctccacaactctttccgtctttgaagctaaaactgtgtccatgaaacagtaactccccactccccttctcycatcccctggcaaccacttttgaaaatacattttacaatgtatgtaatgttcattgtagaagaattaaaaaatttaaaacaataagaacagagaactaataacactttgacttataccttaatgtattttttctctgcatatacatatatgtaactttttttttttactatgcatactgttttatagcctgccctttcacacttaatatatcttcaatagctttacatgtcaaataaatgccatcctttttaatattgaaagtcaatttatttaaataacccccattatatttttccagtctgtgaagggttggggacaaaagatgaagtacaaacatagacctttatagagcaatgctctgattacttttttttccatcctcaattatttcttgtcaacaaataccgtctttttttttttttttttttttgagatagagtcttgctctgtcactcaggctggagtgcagtggcgtgatctcagctcactgcaacctccaactcccaggctccagagatcctcccacctcagcctcccaagtagctgagactacaagtgtgcacctccacacccagctaatttttgtattttattgtagagacagggtctcatcatgttccccaggctattcttgagttcctgagttcaagcagttctcccgcctcagtactgtgggattacaggtacaagccactgtgcccagcctgaattccttctttactttgaggaaggttttctacatttttagccttttaatacgtactgccagattgccctcaagaaaggttgtatcaggtagtacttccagcagcagtggatgagcatccctatttccagacctccagcaaccctgtgtattgtccttaaagaaacaaaattgaaataataggtggatgtggttttcaaaatcaggtrgtggagaagggtttataatgaaaaggtatcagcccacttagcctgatccagctcctagtcctgctccctggagacactttttaataccttctgtgtttatttcctctggtgatttacctccatctctctacataataggtttatactgctagtttacatacacatatgttatttacacactatttacttcctgctggtgagatgaggttttggttccattataccacccactttctcctccatacccatttttaaaattgttatattacctttttacttatatttaaaactccctgcagttagcatgggcagttcagtttctcttgactgcctttagtgagcattaaggaatgggactcttctactcttttctttccttctctacttttggctttggtcaatttttttctttttctctctcttcttttactttctttcctgcctttcttccttttctctttttgtttgtttacattttgaagattgatacaatttacatttcttgtttcgtaatcacatagtttggccttctatgccttgtccataagttagctctaaaagttcaaaagtcaattaagtgcttttatcgtggctccttaaatgtagttccttgtggacctaagtaacatgttgattaccacctggtacagtttggttctgtgtccccatcaactctcacgtcaaattgtaatccccaatgctgtaggtggggcctggtgggaggtgattggatcgtgggagtggtctctcatgaatggtttcgcaccatcccccttggtacttgtattagtccattctcgcactgctgtaaagaactacctgagactaggtgatttataaagaaaaggggtttaattggctcatggttccacaggctctataggaagtgtggctgggaaggcctcaggaaacttacagtcctggtggaaggtgaaggggaagcaatcatgtcttacgtagccagagcaggaggaagagagcaaagagggaggtgctacacatttttcaataactggatctcgtgagagctcactgtcttgagaacagcaagggggaaatccactcccatgatccagtcacctcccactaggcccctcgtccaacattgggaattaacaattcaacgtgaaatttgggtggggacacaaatccaaaccataccagtactgttcttgtgatagtgaatgaatgagttctcctgagatctggttgtttaaaagtatgtagcacctccccccgtctctctcttattcctgctccttccatgtaagatgtgcctgtttccccttcaccttctaccatgattgtaagtttcctgaagcctccccagaagccaagcagatgccagcatcatgcttcctctataacctgcagaactgcaagccaattaaactttttttctttatgaattacccagtctcaggtatttctttatagccacgtgagaaaggacaaatacacatccccttctctgtggatccaatatcaagatacctattccatataaaggagaattttcttagtgccaaggccaaatggattctgttttcttgcattctacaaagtattcaattgtctgtgacttttctttgattcatcttttaatcataactttcctgggcatatttttttgcctgcaattttatggactatcttgtttttcctgtcatgagaatcatatgccttcataccttccaatttactaattccatctgttattttgactgctttctttatcttggagcccactgaattctaatttggttagtctgctttctaagcctcctgcaggtctgacatcctgcaatttcttctcgctggacttggatttaagtccatcatatcttactggattaggtttttatccttatttttcttggagtacattctcaagaaactttctcagaaagataggtaacctcctaaataatatgattttattttgcttctatatttgactgataagttaccataatatgaacttttagattcaagcgaattttcattcagtactttggaattgctctgttatatgctagcatcgatattgctgataaattctgttactggttactgttgcagcctgatggttttttcccctctgaaagctttttaggatctctttatttttcactctgcccctcacagttcaggacctttcagtttgaggacttttgtgtctcttcagctctatgaaaattaatatttatctgtatctcttttttttctccctctttcttaaaaatttccattctattttccctttcttttttcaggaacttcaatcatacatgactttactttgaaagtctcagcagaaacttaggaattttattttggtttttagtaagttttctctgtgcttaaattagtcaattccgcggtaacattgttttgaaaacgtggatttatcccgacattagcgtaaccatgccattttttcccctcctctctgttgtcccctaattcccatgaggtgactttcctttccttagcttaattctctttatttaatagcctttcgttgctgctaagggacagcttttggcggctgctttgcatccccacattagagtaaccatgccatttttttcccctcctctctcttgtcccctaattcccatgaggtgactttcctctccttagcttaattctctttatttaatagcctttcattgctgctaagggacagcttttggtggctgctttgccatttcagacttttcccatgtctctatgtggcagatcttacccagccttcaaggcttgcctatgccctcctcctccaggaagcctttctcaatgactctccaaactatctgtctagtgagtatttctgtacttaggtttatatacagcttagtgttatrtgaagagctttagggagaagtcaataattgctctaatgatttgtgtgaaatatgtgcaatttcaagaacatcaaataattrcatttttactctgaataaaactaatcttaaaatgtgttcctctgctgcaagtatatgaaactagaattgcattgaagtatagtataagaaaccaccagctgggcgcaaaccaccagccaggcttggtggctcacgcctataatcccagcactttgggaggccaaggcagatggatcacctgaggtcaggagtttgagagcagcctggccaacatggtgaaagcccgtctctactaaaaatacaataattagctgagcatggtggcgggcacctgtaatcccagctactggggaggctgaagctgaggcaggagaatcacttgaacccaggaggtggaagttgcagtgagccgagatcacgccattgcactccagcctggatgacagagcaaaactcagtctcaaaaaataaataaataaataaataaataaaagaaagaaagaaggaaagaaaccaccacttagaacgaatggctttggacagagtttgtttctgttgaaaataagtccaggtataagtggttgttggggatggaacagtgagtcagtgatgtcatgtctgccgtttctgcagttctctgtgccaatccttcatggttacaagatggctgctgccactcctgccattatgtcagcattcaaaatagaaagaagaaaaagaggctgacggttgagtcttaatcatttttattaggaaagcaaagctttcacagaggactttgcagcatacttctgtttttgtctcatggctgaagaccgggtcacatgggtccccctagtttcaggggaaactgggacagtatggctttccaccctctgtcgtgggaggcagcaaagaagcagaggtggagatgagctttaggagagccagttaacaaggtaacagagcctgccacaatgggcaagagagggcattaaaagcagttgtgcccaggcgcggcagctcacacctgtaatcccagcattttgrgaggctgaggcaggtggatcgcctgaggtcaggagtttgagactagtctggacaacatggtgaaaccccgtctatactaaaaatataaaaattagcagggtgtggtggtgggcacctgtaaatcccagctacttcggaggctgagacaggagaatcgcttgaacccagaaggtggaggttgcagtgagccaagagtgtgccactgcactctagcctgggtaagaagagtgaaactctgtcttaaaaaaaaaaaaggcagttgtgcccaattgtattaaacattctactccattttaataagcaagtgcaggatacttgctatgccaggtgactgtgctgggtgcaggtggtgctgtgaatcccacgaaggattgtctggggaaaaagggaaagttagatatgcctggaacacagagtatatcgggcagggcaggattggagagggacagaatgggggtcaggagatggcggggtgggggtgggatggaaaatggggaagatttagaagacattgaagagatgagtttgttaactcagagtgggtgagctccaggtcagatattttggattttactccacacaccagtggttctgaacatgtcttagaatcatctggagggttggttaaaacacagattgcttgaccccactcccagaatttctgattctatgggtctgagctggggcctgagaatttttatttttaacaaatcttcaaagtgatgctgatgctgctggtccagggaccaccctttggcatactgtgctaaaaccatgacttaatttagagtagattcattttcttgtataaaaaattggggtctgggcgtggtggctcatgcttatgaaccccaggactttgggaggccaaggcaggaggattgcgtgagcccaggaatttgagaccagcctggacaacatagcaaggccttgtctctactaaaagttttaaaaattgccaggtgtggtggtacgtgcctgtagtccccagctcgggaggytgagatgggaagatggcttgagtccaggagttcaagattccagtgagctatgattgtgccactgcactccagcctgggcaacagagcaatactctatctcaaaaataaataaataaataaaaagggggggtgcattataacaccctcaagctattttaagaaatgtattaggctgggcgcagtggctcacgcctgtaatcccagcactttgggaggccaaggcaggtggatcacctgaggtcaggagttcgagaccagcctggccaacatggtgaaaccccgtctctactaaaaatacaaaaattagccaggcatggtggcaggtgcctgtaatcccagctactggggaggctgaggcaggagaatcacttgaacccgggaggtggagtttgcagtgagctgagatggcgtcattgcactccagcctggaggacaagagcgagacttcgtctcaaaaaacaaaagtattgatgatattttcttatattctatgttattccatcatgtgggtcacactgaccagttagagctagaagctctaactgctttctcgagctagaaaacaccttgcctgagagcatatcttggatattcaaaatcaaccaatccatacccccactcagctctttttatcaggcccctgcagctctgacctctttccatgtgtcctaagtcatcccagggccaagtactggacactgaggaccttcctatagccttgagcccaccaaaattattaaaagcatccaatcccaaacctgttcggcttgcttaccttgctttactaattccctcccacgaaaaccacaggaaaggcttttgcgggtactcttccctcactccctctgcctcttgaccagccctggtgtgtccccatgtggcgctacctgctgattctagggatctgtgagtataaacttgacagtcgtgttcatctctgtgtgtcttaccacagccaataaaacaaatcctgcgtacacattaaaatagtgatacaatacttgtaaagtgccagcagaacacctgctaggcactaggcaaaagggactgctgggaggaatattaggaggaatgtctgagggtagtgtgaaggatgaatgggaggtggagatggggagatgggttagaaggatattgtgggctgggcgtggtggctcataatctgtaatcccagcactttgggaggctgaggtgggcggatcacggacaggagatcgagaccatcctggccaacatggtgaaaccctgtctctactaaaaatacaaaaattagctgggcatggtggygtgcacttgtaatcccagctacgtgggaggctgaggcaagagaatcacttgaacccgggaggcagaggttttagtgacccgagactgtgccactgcactccagcctggtgacagagtgagactccgtctcaaaaaaaaaaaaaaaaaaagaagaaaagatattttgatagtccagggctgagtctgatggggcctagctcgggactatgcaagtagaaagggaccaatagttgctgaaaatatttgtgatataaaattaagaggatttgacagttttgtcagtgttgcaagttggaaacttatttatctgaaattgtttgtaataagaccgtctctgcatcatggctgaaaaagcagcaaatgcagcaggaaaacagttctgaaagaagaaattttgcagttaagatttacccagcaaactgcaacattttacattgcccctttagttacttactaaagatgttttgaaaacgaacaccatcatctaaattcatttaccgtagactggtcctgttcatatagccatttctatttggaaaaggttgatttgattgatcacatgcccttggaaaataggggtgtctacaagagacccaccctggcttagactctttaagggaaaaaaggaaaaagaatctcaaccattttaagatcatcgwtggtttataaaattttcaatgcttagttatttaaagaaaatttaattaaaagatatttaggaagtattaaatttgctaacatgttcaaagaactttaaaaaatgaccaaagataatcctggctaacacggcgaaatcccgtctctactaaaaatacaaaaaattagcyggrcgaggtggcgggcgtctgtagtcccagctactcgggaggctgaggcaggagaatggcatgaacccgggaggyggagcttgccgtgagccgagatcgcgccactgcaccccagcctgggtgacagagcgagactccgtctaaaaaaaaaaaaacactaaagatatataaacattattgtaattaataggttaaaaaaataaaaagactgtctctgccttaagtgcagccttgctgctttgttcagtgacttcttggatggcatcagagaagtcctccttgcttgactctagtccacataaatgtctttttggatgaggccagaactcccaggtagcatgttaaggaagatattgcaagagtcaagaggtgctgtagtgattatcagctccacatttcctaaagtgtattcacctggtgttcatccacacctcagttatgaattagccgttacatgaaatatgttttcatatttttagagattgggaaatgacaggtgaactaaaattaagccattttatgtattgcagaccttttcagagcctttaatatggtagtgggattctgttaatggaaattattgtattcagtgtttctctaactcgtttgttcacagaacctttttttttttcagagcgtcttatgaatctattttttcatggaacaaattttgggaaacgctgccatgacctaacaagctgatgtataacactggtggcaatcaagatttttgtgggtggtgttgattgttctcctgaaactcataagtggaacagtgcacaatttcaagatcagtttgcccaggctctgttttgcttttagtctctcgtatacagaaagtttaaaaagatatgacttgtacccagatgtcatctacacagcgcctgtcatcctgtggaatgactcatcccttgaaaatggtggatagtgctttttaccttgatgatgaataatgatccttgtttcatttacaaagatgagacctaaaataccagccttcctaaaaatactatcacctgttaggccgctgcctttccttgaaggttagcttccataggtcaggccttcactaatgctctgctgaagtgcttcaggaatagtgaaggagggaagtctcagaggagtggagattgggctaagtgacctctgttgctccttccaactcaacagtcatgagtcttttccccagtcagtaaaacctgttctagaattttcttaaatccttttgatcattaaatgagtttatgaccttacatttttaagaacaaatttaagcagaatttgtttctagcataaatctttttccttcaaagaagagagcttattcctcttttatcagctatgtagctgcaatacttgtatcagtaattttattttactgtttttatttcaataggtttttggggaacaggtggtgtttggttacatgaataagttcattagtggtgatttctgagattttggtgcacccatcaaccgagcagtgtacactgtacccaatgtgtagtcttttatttctcacctgcctctcaccctttcccccaagtccccaaagtccttcttatgcctttgcatcctcatagcttagctcccacttatgagtgagaacacacgatgtttggttttccattcctgagtcacttcacttagaacgatggtctacagtttcatccacgttgctggcaatgccattatttcattccttttcatggctgagtagtattccatggtgtatatcacattttctttatccactcattgatcagtgggcatttggtctggttccatatttcgcagttgcaaattgtgctgctataaacatgcatgtgtaagtatctttttcgtttaatgacttcttttcctctgagtagatacccaggagtgggattgcttattggtgattttaatttgcatgtagttgatgtatgagtacttgctgtagctagctgttaggataccctacaactcagcacttgtttttaagcaaaaagtagtaaaaactttaaagaagtgttacagttaaaattatatatacatttatattttatgtatgtataaatatatgtgtgtgtatgtgtatatatatatatacacatacacacacacagttaaaaaatatatatatatacacacacacacacacacttacaaggggtttggggcactcatcccccatgcaattgaaaatttttgtgtaagtcttgaccccctgaaaactttactaatagactgctgtttacctgaagtcttactgataacatatgtagtcaattaacacatattttgtatatgtattatatactgtattcttataataaaacaagagaaaatactaagaaaatcataaggaagagaaaatatagagaggggttggtcttactgtctcaggtgtggcaaaggtggaagaaaatccatctataaatgaactcatgttgtctgagggcttgtgtgtctgtgtgttgtgtgcacatatatatacaccccaataatatacagaatctaatgaacattttgtttttcatcttgtaggaatcatttatgtaatatgcttaaatacttagtactttgtttttgttaattttcatattatttatttgatgcatagattccatatgctcgtatatatattatgaaacaatgttaagaagaaagctatgaacctatacgcaaatttagaaccaaaacattaccaattctatggaagccacctgtatttccttcccaaacccagtctctttctgtttttcagagataaccatcattaaaaattttgtatttataattctcttgctttcttttcattttattacatatacatttatcctttcccaataaggtgtttaatggtgtttgcttttgagctttatgaaaatggttatcgtaatttaagtagtctttttgttatttttttccaatcaacattgtacctctaagagtcactcatgttgtttgggtaaactttattttattgctctttattaccatataatatgacattatgtgaatatattccaatttctttattctcctctcgatggccattttttgaatgctggcccactcactagtggtagtgaaatcaacttaatgagtatagtggaaaagattagtgtgcatcacatgtagagggaatattgttctgttaaaaggtgtttcatgtgggtacttagtttcattgtcagatatacaaaataatgacattgttttctacaatgcttttaacaagttatccttatagtagtgggttcccattactccatatctccaccaattggrattgtcagacttctacatttttaccaaaatggcagatataaaatggtaatgctttgtggttttaatttgtatattcctccttacgaatgaagttgaccaagcttttatatattcagtaatagttacaatttcctcctttaaaaagtgctratctttagctcattttttttagggttgatttttttttctggcagttgtattttcttatatatgtcttttttctagtgtctttctttttattgttttttcaaccatcatgacaattaatataaatatgtcttttaatcttttcttttatggttagtgttccttatttttattttctgtgatgtcattcaatggtctaaaatataagatattctatattttttcccttaggcgttttaatatctcaccttttacatttaagtctttaattcattggtatttgacttttgtgtaccgtgtagagtagaaaccctatttctttatttttttctcatttggataaacagttgacccagcactactaattaaataagtcatgtctcctcttcctctcccccaatcttagataacacttttttatctgtcatttttttccatttttgtgrgtttattcctgaacatacccttccttctgtttcagtgaccgatgcaaacattgatataatactttcttaattactgtgacttcagtaagtttcagtatgtggtcactgaagctccctcaacttattctacttaaggataatcttattttttcttaagcctttgcatttccatacaaattttatttatttattttgttgttgttgttgtttgtttattttgagacaggatctctctgttgcccatgctggagtacagtggtatgatcataactcactgtggccttgaactcctgggctcaagagatctttctgcctcagcctcttgagcagctgggactacaggcatgcatcttcgcacccagctatgttttcatttttgtaagrcaacgtctcactatgttgtctaggctggtcaagaccagtcttggcctcttggccttcagtgatcctcctgcctcagcctcccaaagtgccaggatttcggtcctgggccactgtgccaagccttccatataaattttagattctgcttgtgaaattattttttaaaattcttattgggatatttaattgaagctgcattgctatgaagagaactgatatgttttcagaactaattcttcccattcatatatacactgtatctctccatttacctgacttcattcatgtcttttactaatttttaaatttttccctatgaagacattgctcatcttttgttaaatttatttcaagtttctttgctgtatggaatgaatttttaaattagacttttgagtatgtactggttatattaattttgttatattgatcttgtatctagccatctttctcaagttttattatttataataatttctgtagattactttggattatctttgtgaacaaacatataatcttcaaatgtcagtataggttcttcccttttagttttaaaatcttctattttagttgcttactgagctgggtagacagtaatagtgggaatccttgtcttactcatgattctaaagagcatggttttattttattttattttcaccctctccccaagggcrtgtttttaacatgtttccagtaagaataatgttttataggtgctttttaaaaataagttagggattttccctgttatatttttcatcaacagacatggagttttattaaatactttgtctgcatttttgagatagtcttattttgccctttaatttgtgcatgtgatgaattatacttgcaggttgctaaagttaaaccattcttacattctctagtaattaatcaaactttttcataatgtgctaatttttttaggacttctgtgtcattaatacatgaagatggtctataattttctttatactgtccttttctaattatggtatccagttatgcttgtttctcagaatgagttgcactgtgttacttctttttctatttttttcataatagtatattaggcatattaagaatttatattctttgtataagtttagaaagaaatatttcttgaaaatttacctgtaaaacatcttggtcttctgttttctttttggaatgatgtttaattactggtttaatttctttgatatttatagaatgactcaggcttcctctgtattctttagtgaattttgtcttgcttttgtttttctaaatggccattttgtctaagttttttttttaaaaacttgctcacaaatgttatatatcttttaaatctctgtagcttttctgtttatattccacttttatttcctattattatttacctgtttctttttcattttttctctgagtaaatcttgtagaggcttgccattttgttagttttttccaaagaattaacctatatgatttttactatattattagtttctttttttattgttttttcttctaatttattgaagtttattctgtttacttcttaaatattttcttaaatattttcagcttcttaartattttcagcttctcttctaagaaattgagtttctgtattttttctaaatatcattttgctaccgaacaaatttgatatacagtattttcattgtctttcaactctaaatattttaaattcctaacagtaattctttttgacctgttatcgatttagaagtgtttacaagatcccagatttgtttgctgttaaacttgttatttatttgaatttaaattacactggggtcagagaacatcatctttgtgacttctgacctttgatatttgttgagatgtgctttacagacttacaagtggttaatctttgaaaataaattattgtgtgcataaatcaatctaataaatcttgctatcttatccttttcaaatcctctatgtccactttttttctgccttacttctctaactgaaagaggaataatgacatctattgtggcaaaatttccaaggcttccctgagtttctgtcagtttgatttttatattgtgtgattcgtatcaggtaccaccaaattcagaattctcgtaacttcttgatgagttaaagttttctaacattatattgctgtcctctttctttcataatgttttttttctccctcaaagtctattagattartttgaaataggctggtatatgtttttatttctcttttgatctccctgattgtttgtgttttagatacagctttttattattagcacagagctagattttttgtatctgagctgagcatcttttgcttttaactagaatatttagtttatgtatgttttgtgatatatttgagtctgtgtttactattttactttgtgctattttttctatattgctttatgcagcaccattttttgttttcaatcattaactttttattatattgtctgttactttggaagatatatactctatttctactctttcagtggtacccttgtaatgtttattacattttagtttaacaaaatctgctaagagcttagaacacttaacttcaaccacttcaccttcttgattcacatgatattgttgtcttgtatctcagttccatcttcaaagtttcttttttacttttaaaatttacatgaagtaaaatttacttttttgtagactcttatttgttttaacacagacatagatttatgtaacctccaccacaaacgaattacagaacaattctgttacctcaaaaagttccctcatgcggcatctttgcagtcaaaccttccccacccccatctacatcacccactgcgctgctttcygtccctatgacttagcttttccagggtgccttataaatgaaatcattcagtatgtatgaggcctttggggactggctttttacactgagcgtaatggtttgacatctatccatgttgtagcatgtatgagtggtccattcctatatcttgctaagcattttttgtttgtttgtttgtttgtttttgagatggagtctcgctgtgtcacccaggctggagtgccatggtgtgatctcagctcactgcaacctccacctcctgggttcaagcgattcttctgcctcagcctcctgagtagctgggactacaggcacccacaaccacatccagctaatttttgtatttttagtagagatggggtttcaccatattggccaggttggtctcgaactcctgacctcgtgatctgccctcctcggcctcccaaagtgctgggattacaggcgtgagccatcgcacccatcacctgctgagcatattctgtcatatgcacctattctctagtttatccattcacctgttgaagggcatttgagttgcttccagatttttagtattacaaataaagctctatggacattcacagagtaggtgtgtgtgtgtgtgtgtgtgtgtgtgkaacataaatgttcttttctctagagtggctctgctgggtcatatggcaagtgtatgttcaagtttatgacaaactgccaaagtgttttctacatcggctgtaccattttgctgtgcccaactcctagcaatgtgtgagagttccagttattccatatggtcaagaacttgatgtgtgtgtgagtgtgtgtttgtgtgtgtgtgtgttgtcactcaaatactagtatctcattttgctcttaatttacattgtcttaagggctaataatgttgaaccatcttttctgtgcttattttctgcttatctgtcttcattggttaagtttttattctgatttctagcccattttaaataggattttttttcttattgttaagtttcagagttctttgcatgttctgtatacaattcttatatatgtgagttacaaataatttctctctttttctgarttatcttttcatcttttaacagtgtctttcacagaacaaaagcttttagttttgaagaagtctaatgtatcattttttttcttttatgaatcatggttttgatgttctaagaatccattgtctaaagcaaggtcacagatattttcttctatgtttcctgtaaatattttataactttttttaattgaagtgtgtgatctattataaattaatttttgtgaattatgtacaaatgggccagggttcatagttttgcctatttatgtattctgtagcaatttgttagactatccttcctccattgaattgcctttgtgccttttttagaggycactgatcatatttgtctaggtctactttttgtacttttattcttttccactgatctgggtttctttatttttgccaagaccgtactctcttgattgaytacttaattttatactaaatcttaacattggatcatgtgagtcctgcttttctttctagaaaattttaactatttcctttgtactttcgtatcaattttagaatcaatttgtctgtaactataataaatcttattaagattttgattgggattgcatttaatctgtgatcagtttggggagaaktgatayctttgccagatacaaataccacagacatgctttttctctctatttagatttgcttttatttatttcataagcattttttagckttctgcctatacattctgtacatgttttaatggattaacacctaagtgtttttttaagaaactgtcagtggtattttttatttcagtattcatgtgttcattattagtatgtacaatttatttttgtatgtttatctcatatgcaatcttgcagaaaccattagttctacgaatttttttataggttccttggcattttctacatagactattatatcatctgcaaatggagacatttttatttgtccctcttatatctacatgctttttttcttttcttgtcatattacactaacttaaacttccaggaccatgatgaatgagtggtaggagcaaatgyacttgccttgattcctgttttggaggaaagcatgtagtctttcaaaagtatagattttttcatatatgttatttatsaagttgaggaagtttccctctactcctagttttctragagtttttttttttttttttttttttaccatgaatgggttttgaatcttgttaaatgctttttctacattaattgctatgatcgtgtggtttttcttccttactcttttaatacagtgagtggattacactgattgatatttgaatgttgaaccaactttttatccttggaataaatcccacttggtttgttattcataatggtgaattagtcatacataatgaaaaattatttttatacattgctgaattacatttgcattgactgatagattgattgactgattgacagggccttgctctgctctccaggctggagtacaaaggagtgatcatggctcacattgaaccttgacctcctgggctccagcgatcctcccacctcagccacccgagtggctaggactacaggcatgtactaccatgcctggctaattttttctctctctccttttgtttttgtaaagttggggttttattatgttgtccaggctggtctcaaactcctatcctcaagtgatcctccaccttggcctcccgaagtgttgggattacagacgtcagtgaccatgcccagcctatttacttttattttgttaaggacttttacacccatattcatagaggaatattggtctataattatttttttggtcatgttttgatatcaaagtagtattagattcayaaaatgaattgagaagcgttccttctttcattttctggaagagattgtttagaataggtgatatttctttttaaaacatttggtagaattatctaatgaaatcttctgggcctgaagatttttgcagggaagtttttaaagtacaaattcaaatttttatagctatagagaayattcaaatgatctatttcatattatgtgtattgcaatcatttttgttttttttttttttaggaatttgtccatttcatctaagttgtcaaatttgtgtgtgtaggtttttcaaaggcatccttttgatttctgcagggtatgttaatgatattccctgcttcattcctattgttgataatgttcttttcagtcttgctagagattttttaaactttattgatcttttcaaagaactcgctctttgagtttctttagtttttgttgttgtgttgttgttgttaaagtcattattttcttcccttatgctataatttccttcttcctgcttgctttggactttatttggtcttttttctaggttgttggagtaggatcttttattgacttggaactattcttttctaatgtatagatttaatgctataatttttttcccagcacaactttggttgtgcccaacatttttacatgttatgtttttatttcattcagtttaatttttaaacatctgccttgagaccctccatggattatttaaaagttgtttagtttccacgtatttgaaaattttcttcttatgctgctgttactgatttctcatttgattccattgtggtcacggaacaaactgcatatgactttcattctttcaaattagttgaggtttgttttgtagttccagatgctgtctatcttggtatatgttccgtggaaactggaaaataacayatattctgctcatgttgggtggagtgttctgtaagtatcaattagatcttattggttaatggaggtgttgtgttttttatatattgttgctgatttttaaaatttagttctattaattattgagagagaaggtgttgaagtttccaactatagttgtgtatttgtctatttcttcttttcattgtatcagttttttgcttcatatattttacagctctgttttttggtggatatacacttaggattgttgtgtcttagtggcttgacccttttgtcattatttcatgctcccctttatctctggtaattttctttgttctgaaattgtctttatgtgacattaatatagatacttctgcctttttggatcagtgcttccattatgtcttttccaattttttatttttaagctgcctgtataatttatttgaaatgagattcttgtagacaccatatttttaaatccattcttctagttcttgtcttttaattggtgtgtttaggctggttacatttaatgtaattatagacatgttaaacataaatctgccatttttgtttattttttgttttctgttctttctgtttttcattgcttgtattcctttcttctttcttgtattcatttcttgttttcttgtattcctatgggttaatttatcatttttgagaattccattgatgtatttcttgtgtttgtcttgttccattttgtgctctaacagaatgccacattctgagtaatttataagaarctgaaattttattttctcagagtcctggaggctgggaagtccaacaaggggctagcatctggtgaaggccttcttgaaacattataacatggcagaagggaacacatgggtgagagagcaagagggggccaaccttgtccttttataagaaacccacatctgtgacaatgaacccactcccacaataacagcattaatctgaacacttcccattagatcccacttctcaacaccactgcattggggatccggtttccaacacaggaacttcaggagacatattcagcttttagcattctgcctctgacccccaaaattcatgtcytcacatgaaaaatgcatttgctccatctcaatagccccagaatcttaactggttccaataccacctcaaaagtccagaatctcatctagatcagatattgatgagattcaaggtacaattcttcctgaggcaaacttcttctagctgtgagattgtgaaatcgaaacaagtaatctaccttaaaatgcagtggagggaaagacatgggatagatgttcctatctcaaaagagagaaataggcaagaataaagggataactggttccaactaagtccaaaatccaatagggaaaatgttaaatcttaaagctagagaatcatttttactccatgtgtaacttttgagcatactggggtggaggttttgacctcaaagccttgggcagtcctgttttcatggttttgctgggtgtggcagttttctcaggctggggctatgtgctggtagctctacagttctggggtttgggggcagccctgtccccatggctccactaggcattgccttagtgagtactctctacagtggctttgtccccacagttctgctgggcatcaccctaatagactctctctgtggtggttccactcttgtgacatgtctcttgtgacatgtctgtgcctggatccctaggctgtctgatacatcctttgaaatctaggtggaggtagttttgtacccctgtctccaaaaatgtatacctccacagcttatgaactctgtgcaccagcagagttagcattatatggatgccaccaagcttaccacttatgccctctggagagcagcagcccagactacacttggggttacttgagtaatggctggggcagccaaggagctctgcactggaatgcagggracagagtccttgggcagtgaacccatggaaggcatcttgggctagtctgatgaaaccattctcccctcctagagctctgagcctgtaatgggaggagcagcctcaaagatctctgaaatatcttggaggtmattctctcattgccttgatgaatagcacctggcttcctgctatccatgctaagccytttctcaaaggggacacttggcacatttttgtgttttacgtggccaggctgtgaattttccagatggttacattctgcttctcttttaatcataaattcyacctttaaatattttctctcctcttgcatcttactgtatgcagttaaaggaagccatgcagattcttccatattttgcttagaaatttcttccaccatgtatcctagttcatcactcttaatttctgtcttcattaaaacccttggggatggacatagttcagtcaagttctgtataactttataggaaggatggacttgacttcagtttctaataagatatttttcattctcatgtaagacctcatcagagtggtctttactgtccatatttctgcccacattgtgatcattaatatctaagtaacctctaagaagttttacccttcatacagctcttctcttctgagccctcaccagaatcacctttaactctttgttcacagcaatgcagcctttttctagcctgctcttccagactcgtctagtctccactatccagttccaaagctgcttccacaattgtaggtatttgttrtagcagtacctcactctctggtaccaattgtctttgtgctgccataaatgaatactatggtctctaatttataataaacaaaaatttattggccgcagttctgaaggctgggaagtttgagatggaggagctagcgtctggcaaggtccttcttgctacattgtaacatgatggaagtcatcacatgggcaggagagagcaagagggagctcacgttgtccttttataagaaacccaccctcatgataatgaacacactcccacagtgacagcattaattcattgagggttgtgtccccttacccatatacctcctcttaggcttcacctttcagcactgctgcattggagatcaaattttcaacatgtgaactttgaggaacacatccaaaccacaggagtatagttgagatggctctaggtgttacctactatttacataacttatcatagtctgctgctatcattattttaccggtttaagtgatagcttcctccatccttggtatttcaagtttccttcttttatcatttttggggtttttttttttttttagatggagtctcactcttgtcacctaggctggagtgcagtggcatgatgtcggctcactgcaacctctgcctccccaggttcaagcgattctcctgcctcagcctcctcagtagctgggattgcaggtgcgcaccaccacgcccggctaattttttgtatttttagcagagatggccatgttggccaggctggtctcgaacttctgactgcaggtgatccacccgccttggcatcccaaagtgctgggattgcaggcgtgagccactgtgcccagcctttgggttgtttttagataactttctttagcaataagaagcctgctgatgacaaattttgtcaacttttgtatatctgagattgtcttgatctccccttcatttctgaagaatattttcattagctaaagggttctaggttgacagtttctttctttcaaccctggaaaaatgatgtgccactttcttttagtctccatttttcttgagaaatctgctgtcattctaattgcttttcccccattgttaaggtatcatttctttcaccttggtttcaagatttgtctttagttcttagaagtttgaccatgatgtgtcttggtgaggatttctttatgtttatcctctttggggtttgttcagctttttaaatatgtaggtttgtgtcttgtgccacatttgggacatttttagccattatttctctgagtattttttagcctatctttttttaacttttttattgtggccaacttagtctaatatagctaccattttttcccttcttcttctgggactctgatgacataaaatatttgatcttttgttatagccccacaggtccctgagggtttttttgtttgttgatttgtttggtctatttttgccctgttgttcagattggaaaattgctgttatgcttcctccagttcactgattctttcatctgcccgctctgttctgctgttgaacccatcaactgagttttttttttttgtcaattagattgttgtatttttcagatctaaaatttttgtttcttctttatatcttctattttctttctgagacttcctatttcatttatttcaaaagtgtttattactacacgttgaagcattttcataatgaatactttaattggaatctattgtctttttttctttcagtttgagtttttttttctgcttcttggtgtgatgagtaactgaaatctggatattatggctgttatattatgtgactctggatctcatttaaactttgtcttgtagccagctttctctgatgctgctctagtggggggagcagtttctagtgctttgtttctgatgagctggggtagaagtccagattccccacttggctggccttcattgacccttcgaagatggaggttcttcttgttaatacttggtgggtgtgggagttctggttctctactgggcctccactgatacctcagtggctggtgggagtggggttatgagtgtctcattattgctccctacttggctttcactaatactgcagaagggagcagccttgttactgctgggtgttggcaagagtcctgtctgtccactaggactcctttgacaccacaccaatgggaaggtgaagagatgcttcrttatcaccacatgggcgtgggtgtccaggtgaccatrtgatttccactggtcctgcagcagaggaggatgggctttgtcagttgcctagtagtgatagacgcttccactccctagatggatgttctctttatgtttctcagtgttctctgatgctcccacactgatgaggggtacgggcttgggtggttgttacagcctggtaggagtagaagtcagggctccctactcagcttttgctggcttgggtggagtaggacacagttcttttctgtggtgttggctgcagtgagcagttttctaaaaagtgtctgtctttctaggctgctcctttctttgtcctttgtctacagagaccaggcttttgttggggtttgttttgtctgagcctcttggtgttttaggtgttgctgttgttcttaagctccaagtctgagaaatgtgaaggacaacacttttaccatgttattctgaaggttcccagccagtatgccttccttctccttttcagggtcttacgtttctaaacaatcctaggtttttagttgtgtgagtgaggagaattgctaaaatacattcactccttcctcctggaagcagaagtcctactgcttattttttaatatatcatttgttctttgatattttatacatgtattatagtctttgatcattgcaatagtcgaaattctttagacttcttatatgttgtttcttctttctctgtactcttaaatcttgatgatttgttttcatgtgaatttgctgtgtttgtgtgtgtgtgtgtgagagagagagwgagtgtgtgtgtgtgtgtgtgcacgtgcgtgcgtgttgtcagagaaagagagagtgagaaagagagggggagagagagagagagagagagcgttaaatcagaatgctttgttcctgagagaattggcactcttctctgacatgaggcaggcagtgctaatgggttagctgggaccagttcctccagcatccaggttctttctctaaatgtagaagtttcaggttcaagccctccactttcttgtggacataacacttggttgccagaccgtggtggtggcatttgcattagttgccaagattcaatactgtctctgtgtttgttgttaattgatcctttctcagatttctgctacattagcttacttatttgggggaggccaagcgttatgggtggggaaaccttaattctgatacttaaaatatatacatatctggaaacaaaggcatacatttgttgtcatgaatccaggttccaatctgtagcaggagagtcttcagggtatctgctttgctgtgtttgctggtgtgttggttttttaagtttcctaataaattctagttttctctattctcttattaaatgtttctactactcatgtctctgtttttctggtattgccttaattgaagagattagggagtaattatgaggctctgttgttagttttgttactgatatgtttctcaatgttctttttagggctgaaaagacagaagttttgagtgaagaccttcttcaggtaaggyggccattgacactggctcacagataccagagatatatgggaggctgaggcaggagaattgcttgaacccaggaggtggaggttgtagttagcygggatcgtgccactacactccagcctggsgatacagcgagactctgtctcaaaacaaacaaaaaacaaacaaataaaaaaacaaacaaccaaaaaaaccaaaaaactaagccatccctcgatgtggtaaaactgctgcagctgctccttacgaactgttaggagagaagtttttttgtcttttacgacagtactttgcatgatgaatactgatttgggttaagctctttcaggagaggtttaaagtcatttcaccacagttagcccgagggtcctggagtctgtgatcactgcccctccagttctccagcattgaaagctgtctctcattgcggttttgatttgcatttctctggtgaccagtgatgatgagcattttttcatgtgtctgttggctgcataaatgtcttcttttgagaagtgtctgttcatatctgtcacccactttttgatggggttgtttgattttttcttgtaaatttgtttctttgttagaatggtaatcattaaaaagtcaggaaacaacaggtgctggagaggatgtggaaaataggaacacttttatgctgttggtgggactgtaaactagttcaaccattgtggaagacagtgtggtgattcctcaaggatcagaactagaaataccatttgacccagccatcccattactgggtatatacccaaaggattataaatcatgctgctataaagacacatgcacacgtatgtttattgtggcactattcacaatagcaaagacttggaaccaacccaaatgtccatcaatgatagactggattaagaaaatgtggcacatgtaagccatggaatactatgcagccataagaaaaggatgagttcatgtcctttgtagggacatgcatgaagctggaaaccatcattctgagcaaactattgcaaggacagaaaatcaaacaccacatgttctcactcataggtgggarttgaacaatgagaacacttggacacaggctggggaacatcacacaccagggcctgtcatgggatagggggaggggggagggggagggatagcattaggagatatatctaatgtaaatgacgagttaatgggtgcagcacaccaagatggcacgtgtatacatatgtaacaaacctacacattgtgcacacgtaccttagaacttaaagtataatttaaaaaacaaacaaacaaaaaaacaaagctgtctctccaggagtccttgtctccatggaaacatgagttgtgattgtccacacccacaatccctcctcccctgaccttgccctctctcagtggcaccacccgctcttctctctgcaggtggagaagcgtctggagctggtgaaacaggtgtcccacagcacscacaagaagctcaccgcatgtctgcagggccagcaaggggcagaggctgacaagcgctccgtaagtgccctcccagccctggggagctgaaatcttgcctactgaggacaaggttcctactcctgtgacactcctggatgtagctgtttatgtagctgcttacgtgcctgagaattgactcagcagctctagctgcctattttctgttttctgtggrgtaatgaccctccctactgttcttgctctttagcccagcctgaagcatcccccgccctccacaggcaagttgaggtcctctccctgtcctccccagmttggagcaactgggaagacggcaggggcgtgcttgagatcccacctctagggaagctttatccttgatcgatatctgacccctgattcagctcattcatagattgcatttgcctcaatagtatcttaagatctcatggaaaaaaagtgtattgtggttttagaggttacaagtgacctataaaggcccttgaaaattgttttcgccctaatgagacacaataaaaagagcctgctaaataaagcttctctaatgcctttgtctataacctgcattagaaataacaggcattgtataatgcgattccatttcaacagttcttggcatgaacagcctctgcaggtttaccttcctcttgaccccatccctctcagccccaccaaagattaaaagatattcttagacattcacttggctttattacaagggatatacaatctaggtttttctcctccttccttgagtttataatctacatgattggtatcatttagacatttttttttttgacttgcagttattgctgatttctgcatccccttggtcccccgatgcccctcggcttatgttagcctcatttctgttggactgtcatgtaatgtgccacaatacttcttcccagctcctgccgcagtgcaaaaacccactctacttgtcctacgagtcatttctttttttttttttttccaagccctggtttcttctttcttaatattcccagcaggaatcatttgtgtgtgtataaataaaactttcacagctctgaaaaatatctatagaaataattctgcatgtatcaggaattcagcaagaggaactgtctaaagggagagtttgcaaaatgactttgggcatgaaacccttttatcaaacccacatctaatgggggactccaggaacggttccggatgggggtgctggagccaagcctgcctttgatctgtgtcttttttttttttttttttttgctctaagaagcactatttttaaaataactggtccaaagtacagtatgttttggtatcgggagtatcatctgaatgctaccaccagaggcttgaattcggcctttggtgttggtaggcggattagtactaacattatttttctgggatcagatgaatttacctggattggtggagttttcattggattgagagtcttacgtattatatcagtaaggatacatttggatccttgagtgatctgaagtatagggcactgatagaagatttgaggtatggcaaagccagcagatcaggagatgattgccaaggagagataattattcaccctccccaagagaaggggacaggccacatcacccagagggccacaggggaagctctagggttggtcaggaggtaaaggaggggactgtgggccagagcctttgttgtggtgtctgcagcagatataggattgattagtttgaattattacggacgatttctagttgtctgacctaccagtcaagggtgattagggcagatgaacagtggcctgcggtgtgacagccccttagaggaggttgttgaagtgtgagctccagattggtttgcatttaaaaagcatgctgtgagtgagttgtttactatttctaggaattgcctagcctgggaggggcagtccctctagggtcagcaagggcccaagatgttgtcagagcatctgaatacagaaaataaaacacatggttaataactacactgcttcctagagacttgagaaaaaggcacttaattgcctcacttaacaagattctgatgtagccagttccaaggtttattcagcagctttgggtcagcagctatgtgacgcttgggcctccacttacaactgtaatgtggctgctccagctccacgcatcacatcttcacataaccatatcacaggcaggaagtgggagattgataagaccatgaattcatttcatttatgtttctctagctgcaagggaggctgagaaggtgaatatgtgtccaagataaatgggtttgctatgactggccatgattcaccagcgaggacrtacactatctggcttctcttactagagaagacacacagtggttgttaccaggctctgaaggctgcagtcacatgcatgcagtgataaacgtgtaaactgggagaagtccgcagtggaagtaggtgcccaagcatgtataggtcagtgatttcactgcatggatttatttatttatttatttatttattwattttgagacagagtctcactctgtcaccaggctggagtgcagtggcgcaatctcggctcactgcaacctccacctcccaggttcaagtgattctcccacctcagcctactgggtagctgggactacaggtgtgcgccaccatgcccagctaatttttgtatttttagtagagacagggtttcaccatgttggccaggatggtcttgatctcttgacctcgtgatctgcccacctaggcctcccaaagtgctgggattacaggtgtgagccactgtgcccagcctcactgcatggattttaagtgcttgattttgtcaatgatttcttatgctgattcatctttgcttgtcatcatatgactgaataaatggtctgaaagtcaaagagccatttaaaataggaaacaatcaaagaactgtgggaaaaaaatttccaaactcaatttttttcagtttttctctgaacacattaagagatgtaataggaaaygtgacacttataaatcacctcaaatactgaaatgtatatccagttctttgtgatgattaagtagggagatatgtcaagatcggagcaatgggtgaaaaggaaaagaaataaaatgwaaaggatcaggtaaagggaaggtggggtgggagggagggagtgaatgaacagacactgtctcgggaattgaatgttaagggagggtccagagatggacaaccacactgggagtgtgggtcatagagtctcaggatcaggagagactttatggggatccatgcaatattctgctttttatttgagcacatgtaagttgctgcttgagcacatgtaagttgctacttgagcacatgtaagttgctacttgagtacgtgtaagttgctttttgttatttctcttttaacaagctcagtagctctttagtcatgtgttccaactcctgaacttttgtcataccacttttaaaagttttgccctgaaagctgtggctgccagccagatgtgggtaggcataaaaatcggattttgttgccattatctcagtgaccagagagaacattattgtcttgtgggtactgagtaaaactggattccttatgtggaatgaagaatagaaagcatatgaattacctttccatgttgccatctttttttatttttatttttatttttttttgagacagagccttgctctgtcgcccaggctggagcgcagtggcaccatttcgactcactgcaacctctgcctcccgggttcaaacaattctcctgcctcagcctcctgagtagctgagattacagacgcccacctccacgcccagataattttggtatttttagtagagatggggtttcacyatgttggccaggctggtcttgaactcctgacccatgatctgcccgcctcagcctcccaaagtgttgggattacaggcgtgagccaccacacccggcctccatgttgccatctttagtcctggataataactggttagttcctaggtttttgagactcttaatataatgaagatgtttagttttttgaagtccttgcatttctcattaggaagtcatacccaacaaataaagtgctaccgtgtggaagtgtttctccaccttattcagcaaatatttagaaagcaacaagtctgccacgcaaggcggtgtgtatgccaagtgctgagccagctgagcaggatttctgtgctgcagaagctcaccacccagggggaggcaagcatcatactcacagtgcattcgctgctcagaccgtgtcttagtgccaagaagaagtgcttgctaggaattaaatggtgggaggtttccataaggaagtggccgttaaggacaggtgaaaggtagcagcaccaaaaggggtaaacacacttctcagataagaggacaagatgtgcsaggttccgagagacrggagaaagtttggcttttttttttttttttttttttaattgagatggagtttcgctcttgtcacccaggctggagtgcaatggtacaatctcggctcactgcagcctctgcctcccgggttcaagcaattctcctgcckcagcctcccaagtagctgagattacaggcacctgccaccatgcccagctaacttttgtatttttagtasagacagggtttcaccatgttggccaggctggtatcaaactcctgacctcaggtgatctacttgcctcagcctcccaaagtgctggaattacaggtgtgagccaccacacccggccaagtttggcatttttgagaaacataaaggtggccagagtgaccagactgtagcgaatggggaagacgtgacatggggcgggactgcagaggatgggatcacgccttacaggaggacatggtgagggtttggactttatccctaagagcagaggaaagccagcattttaacagagggagacatgatcagatatgttcaaaattgtatgaataaaggactcatgggtggggccatggtagaagtgagaggccagttacacagagatgggaacaatttcagtgagatgcaacgaggacctgaagatggagaaaaatcggcgtccatggtagatcctggagggagagtatcagggcttggtaactgagtggatgtgggcgtatgaagaagagagagaggtctcatggtctcaaccccaagtgactgttgaatccatgggagctgctgtgatcacctggggagaaaatgcagggtgagaagacatatggcttttgaatcaggaaccctgggaactgcagcatttcctgctctaccaggaggaggacccagcaaagagggcagagcagtagagaatggtactgtaaatccacgcacttgctcctctaaatcccagacaccattctttattctttcctttccatacccgccatgtccaggctgtcagtaagccctgctgactcttcctccaaagaatttccatttggcttcaacatttaccaccctagtctaagcagctgtcagctctttctgaacacagtggctcctatcacatcttccaccccaaacccttccctcctccttcctcttcccttctctgcaagcgcaggagccaatgtttaaattggaaatccagtaactcactctcctgcctaatcctgctccgggattccctttgtagaataaaatctgaactccttatcttggcccttggaacactatgatgtgtcttctacctgcatctctgagcttagctctgggcttccttcccctctgtcatcattcttcagctgtgctcacctggtactgagcatgcccagctcacactcctcttgggccattgtgcttgctctatcctccgcagggaatgctcttacccagcatttcaagccagcaccctgttcggttctcagctcagatgtcaccttttcaggaggctttcttgaccacctaatgtgtctgcttcctccctcaccctaatcccatctccctattttattttcttcatagcacatattagtatctgaaatcactgtgatcatttatttccatcattgtgatgggagcagggatcttgtgtccccataagctccgttctccgtgcctaaaaaagagcctgccccagcagggcaatggtacaagtagatgtgtgtcatgaatggatggtctgtgaatattttaggcacagaacttgcctaccacactagcatgcccttccttttctgtaacaggcaattctgaggttaagctctggaatctgacgacccaagggtgaagcccagttctgtcacttcctaatttaacctgagcttgggcaagttaattacctcataagccttagcttcttcatttggaaaatggtaagaatcataataattccctacccagcagggttgtttgagaggtcagtgaggtaaagcacgtacatgccttgtgcaatgttaacttaagtaaatattaaagaagtgtaacctgatgctgttagcagtggcccgctattagactggagtggctgttgagaaccactgagacccaagcatcaagccttggctgtgtgtctgtttggggctgaaccacagaagagctggttgcctggggctggaattagaggacagtagacaagaattttccaagatagggaatatatgagagagagagagagagagagagagagaggagagagagagagagtgtgtgtgtgtgtgtgtgtgtgtgtgtgtgtgtgtgtgtgtgtgtgtgtttggaggaatggagtggatattagaatgaggcttattgtctgggtcatcctacaaactgtgytgcttgtrcccaagatagttttagagagaatagtcatctcagaaatgtcagattgactatatcgaaactctgggacagtctgtctttccttcccttaattctcaaggttctatctgcattctagagctagggagaaaaattatttcagtagctcctctttggctctgaaaatcactggcagcatgaagtttgctaagatctttttacctgggcactaatatttaccagggattgggactggctttgtcagtgtggatccttggtactggagggaaaaagattttgggagcttttctagatttttgagcaatttaattcttctaagactggatatccttttaaaaaatttttaattaatttatttcaataggtttttggggaacaggtggtgttggttacatgagtaagttctttagtggtgatttctgatattttggtgcacccatcacctgagtagtgtacactgtacccaatgtgtaatcttttatccctcaccctcctcccaccctttcccctgagtccccagagtccattgtatcattcttatgcctctgtagaagactggatatcattatacttgaaatgggggygaccaaagtttgagggagagagcaaacagtatcttagttagaggcaatcttaggttatatgagattgctacaatgcctggcatctcttgagcagataaagtcccttcaccttagagaatctttttagaaagagaaatcatttgtagtctgttgtgcgttacagtccattaacttcttcttatgtactgtctttgattatggggttgctaacgcatttcttcctttctcttgtcatttggtggcttccttgtaatttcttgattcttttgttttttttctttttaatttgagacagtctcgttctgtcacccaggctggagtgcagtggtgccatctcggctcactgcaacctctgcctcccaggttcaagcgattctcctgcctcagcctcccgagtagctgggattacaggtgcatgccaccatgcctggctcattttttgtatttttagtagagatggggcttcaccatgttagccaggatggtctcaatctcttgacctcatgatctgcccacgttggcctcccaaagctctgggattacaggcgtgagccacggtgcccggccaatttcttgattcttaaagcatttacacaaataaaaactcatgttgattttcaccagcttacccccaccttggaatccaagctctcaaattcaccttaacatctctcctcttagagtgacagttacaccattggtagggtacttgagtaaatacattttgtcatcttcattcaatgatctgtgtaaccattaaaataaaagaacaagacagttccataggtagtgataggaaatgatatgaaaggtatctatctctatgtgaaaaggaaagcaaggcacagagtggtgtgtatatttagtatgctaacgtggggagaaatactaaaagtagacgcacacacatgtatgtataattgaatctgcttagaatatttatgaaaggatacacaaaatctggtcactattagggtctttggtgaggggaatgaagtggttgagggatgagtgagtgtgggagggactttttactataaatcctctagcatcttttagttttatttatttatttatttttgagacggagtctcactctgtcacccaggctgaagtgcagtggcacaatctcagctcactgcaacctctgcctcccaggttctagcaattctcctgcctcagcctcccaagtagctgggactacaggggcgtgccaccacacttggctaatttttttttttttttttgtatttttagaagagacggggtttcaccatattggccaggctggtctcaaactcctgacctcatgatctgcccgcctcagcctcccaaagtgctgggattactggcaaattaattcttttcctataatagatatgatagagaatgagatagggcargagggagaggttatgctccttgttaaaattaaaaagcatatcccttaagaattcacttaattctgtcctctctgctacctaagaggatgtcaaaatcattagtgcaggtgttaaatgactcaaaatgatgagaaaatgtagcttccttggctcaggagcagggtgcctccagccctatagcttcaaactgtgttttccagtctgcactttgcagaacagttgcctggctgtcccctctccatcctccctccaaaagtccgatcaacctcatgttcctccagtggccggtcttgtcctgttgatcttgaccttcgttcatttggtcccccttgggcacagttttctgctccactcactgacaggataatctgactagtctttttccatatttggaaaaactctacttaccttctggtagatgtatttcttcaaaggatgtcaactcttggactatcagaagtcccctttactataggcaaatcctctcttctttgtccaatttcagaaagattcagaaatgctgaagtcttgtcctgatggcaggtcatgggactgtgaatgtttatcacaaaccagaatggtctttttatgtgagctcatcaatactatgatcgtaccatctgacattcaagacgaagcatcttcactgacttgtcactgaggtattgtagacacttgcaratcaaaccaggtttctcaaccatggcactattgccattttgagcctagtaattctttgttggaggagactgttctgtgccttgtaggatgtttagcaacatccctggcctctacccatcrgatgccaatagcatctcccatgctgtgccaatcagaaatgtctccagatgttgccaaatgaccccaggaggacaaaaatcacccctggttgagaaccaataccttaagttatgccctctctgtgaggctacaactggaatattatgcctgcttctctgaaaaacagactctgtttgtctacacttacataacacttctgtgaccacatgtgtggggggattttctccacacaccaagcagttccccaactctctgaacaccaggtgtatgtcttgcaatttattctgacactgtatacctggagttggtgtcagatcccgcaggttaagggctcagtcctacaagactgcccctacttaagatgtcaattgcaaatccagccttctggtatttctcaacaaccagctataaattaggggtcccacaactcccctcctcaggtttgataatttgctaaaatggctcgaagaactcagggaaacactttagttgtatttatcagttaggatattataaaggatacaaatgaacagccagatgaaaagagtaaacttagggcaaagtatgatgatgtttattatttatcttcaccattagaagtaagttctgtggctgggtgtggtggttaacacctgcaatcccagcactttgggaggccaaagcaggaggattgcttgagccgaggagttcaagaccagcttgggaaacatagtgagacaccatctctacaaaaaatttagaaataaaattagccaggcatgggggtgcatgcctgtagttctagctgctcgggaagctgaggcaggaggattgcttgggcttaggagctcgaggcttcagtgagctatgattgcaacactgtgctctagcctgggagatagggccagaccttgtatcaaaaaacaaaacaaaacaaacaaaaaaaacagaaaaaaaggaaagaagaagaaaagagaaaagaaaaatgttctatgagagcagtgtctagttttgtttatcactggtttggtgcctgccctccataaatattggattagtaaatgaattataagtggaaacgctctatgtgttaacaccaggaggctctgggctgggtgtagttcagtcactttctttttgaagaactacctttgtagctacgtagactggaagacctgagaaggtgctagtggttcttaccttgtttttgttctgtctgtgtgtactggctggtcttagttcagaaaggagagagctctttgatatttagcctggggaacggatcatgctaaactcctatcacagcttgtctctccctccctgtaacataaaatgtagcatttaaaagtgtacagtggttttaacagttagtctatttaccaccattatctagttccagaacgtttccatcatccccaaagggaaccccatacccattaagcagtccttccctattttactcacccctgcagccctgtgacaagcactaatctactttctgtctctgtgaatttgcttattytggatatttcattaaatagatttatataatatgtgtccttttgtgtctaggttatttcacttagcatgatgtcttcaagattcatctgtgttgtaccatgcagcattccctttttcatggctgcataatgttccattttatggrtataccacattttgtctgtccatttattcattggtggacatttgagttgttcccaccttttggcctttgtgaatagtgttgctcttcacatttgtgtacctcttttttgaacatctgttttcagttactttggatatatacccaggagtggaattgctgtgccatgtgataattctgcttaacttattgagatactaagtacaccttcacagtgctgcaccagtttaaacatctactagtaatgcatgaaggtttatgctcaccaatccttattttttttttgctttgttaagcattaatattattatagccatcttagtgagtgtaaagtgaggtcttgattggggttttcctaatgactaatgaggttaatyatcttttcatgtgctctttggccatctatcttttttggagtgtgtctttattttcatgcttactctttctgggttataattgcatgtgaacacttttctgtctcttttttgaccatagctgcctcatttctttttttttttttttttttttggagatggagtttcactcttgtggcccaggctggagtgcartggcacaatctcggctcactgcaacctctgcctcccgggttcaagccattctgctgcctcagcctcccaagtagctggaattacaggcatgcaccaccacacccagttaatttttatgttattagtagagacgggctttcaccatgttggccaggtcggtctcgaactcctgacctcaggtgatccacccgcctcggcctctgcctcatgtaaagtgctgggattacaggtgtgagccaccacgcccagccactgcctcatttttaaaataaggctaatacactccttaagagacatattatttttggaaattaaggcattgctcaaatctttgttaacatcattttaaatttttctcatttttccttcttgccatcctacctcattttaaaatgcagcatgtaagccttaggcttatttcccaaagtggcaaatataattcagttctcgttttctgaattttgacatctctaagtctaacccatcatggtgcactatgaatttctatgtttaaacctattttaaagttagcttgtttcatagttaatataataccttggcaagtatttgactttttgctattttagattcaacagatgaatatggaaagtagctttcattacagcatttgctttcttttcagaaaaagttgcctttgacaacactggctcagtgtctgatggaggggtcagctatcctgggagatgacacacttcttgggtaaggtgacaccttgcgtgagtttggtgccaaatctaagtaagtccccatcygtgaaaaggggactagaccctctcagggaagcacctgaattctcactggggactttagtggaaaaaaggaaaatgttaccagtaggaaatcagaactcttggctctaaagtcatattgtctgtgyggtgaggcaaggcccaagtggagagattaacatgaaactgatgaaggacaattgaaatccctagggccctagcagaagcaaatatgaaacctgtcaattcaaatgtcagaacttacgagattctcagaaaagcagcctttgccgatgttgagctcacaacaaaacaaactgaaaatagaatcgtcatgagagagcatcagcagacacaatcagtagaagagtcagtaccctgagaacgaaaaataatagaactatatggaagaaaatataacaattatttaaatggaaattttaaaattaaaaaacagaatccttgacaagagaatcaaacaatattaaaaaagaataggcgggattgaaggcaaaccaaagagaactttccaaaattatgctgaaaattttcaatgatctttagtcaaaagaaactcaagattatacacaaataaataattgctgaacttgaaaacagatgtagagccgccacccagaatgaagggaatgaagtgcagagataaggaggtaggcattcttaaactgagaaacatgggtgatagaatgcaaaagcttaacattccatctagtgggaattcctgaggaagaaaatagggagaaaggtaagtttgtggttgaatttttcttttccagatttaaagaaaaacatgtctttggatttaaggagcacaaaatgatttgattgagatcaacaagaaaaaaatgcatccctggacatattgtagtaagaccacagattatcaacaaaaaatagaaaaatgtaaaattgaccagagggaaaaaagatcattactataaaatagcaattaaactgttaacaaactatgtattcgtcagccacaatgaatgccagaagataatggagtaatatcttcaagtattgagcgaaaatgtaagaaacctagtattctatgataaaatagggaagagtaaggatattttcaggcagatttgaagaagatactacctgcatattctcactgaaaggactagttaaggctacatgaaatagattacatctctttcacagaaacagaagaaagatgagaagtacaagtaccaaggtaggaaaaagattgtgttgtaggggaggaaacttttttttttttttttttcctctctctaaacatcttaggttctttggttgggccctgaaagttagattgacaaaaggtagattaacaggagaaaagcaaataaattttattaaaatgtgtagtacatacacatggaagaactcagggatgagtagatcaaaggatagaacatgggcttatgtagcctttttttttttttttttttttttgagatagattcttgctctgtcacccaggctggagtgcartgacgcaatctcagctcactgcaacctctgcatcccgggtgcaagggattctgcctccacctcccgagtagctgggattataggcgggtgccaccacgccgggctaatttttgtatatttagtagagacagggtttcaccatgctggccagactggtcatgaactcctgacctcaagtgatccaccctcctcggcctcccaaagtactgggattacaggagtgcttatgtagcattttaacaaagaatgatawttttttagagaagtgacaagacaaaagagaaggacttttacgtttctgtggtggcagaatcagtatttcaagctcctgtattgtttgaaaggaggataaaggtattacatttaaatttaacatccaaaaaataaaaaaataaaataaatttagtgtcaaatatgcatgttataaaactaagactaaccacaaaaagaatagaaataggatatataactttcaaactaacaaaggatgaaaaggaaaataaaaaaaaatacatggaagggactacaagagaaaaaagtaaccaaaaaaaaaaaaaaccacataataattggaaaacagaaaatgagggtggtagcaatcattgcatatatctctgcaatcataggagatgtaaatggaataaactcaactgttcaaagaaaatttcaggttgacagacatgaaatcctgttgtatggtatttccaagagtcatgcctataatataatgacagagtaacattggaaataaagatgacagattgaacatgcatctgattttctctccttccaaaatccgctaaaactacaatatggagattttttttttttcttaaaagacataaacccacaatggcaggaaaaagcagacaacagcaacacagttttgtgagctgtaaagcatatgaatgactgggaactaacttggcaagtccccaaaagctgactcccaagccagaagtagatatgcaaagatcccatgtaaattacatcacgtaatgcttacagtgctcaagaattggcaccagggatctctggaatagtgggtctttgggggtggagtgggtgattaaactcacgaatgtggttgaaagcttttcagttaccacttggatcactaaactctgccccaaccacatgtctaggaacctgtcatcccccgactcccgcctgagcagaattctctagaggggataagagagcatctctagaatgggggactcccggtgcagtggagtgtatgggtaccattcagtaaagaagaggctcgagtgatctaatgtgtactggatgtggatgctaatactccacagccgtcttcttccactcatgcagccccccaggactttaccctctaagcaggaaattagaagaggtttctcaggagaatcaggttagtccaaaaggaaggacctaaagatctgaggatgttggagggggtcagtgcctcaataagtgacgcaaccacgtctttctacagatgaattcacatactctgagctttttagtctccactcttgaatatagagaggcaccaaagatcatcagacatctgaggaaagtctctaacctgaaacctggagaccaaaacaattgggtggatacaatgcagcttggaagaaacagattgtgtaggggaggaaaaaaggttaggagaacaatcacttgtgttttcaaatggtaagggaagataacatgtccatgaaatgaaaaacaggatgttaatacaaaatatttatgggaaagaaatagccagagatcaaaagcaagcttgtagaaatgagaaaatatgatagaagatatgaaattctcagtaggaggttgggaagataaatatgaagaaatcctcatacactcagacaatagaacacacagacagtagaaaaaattagaaaattaaaaaattagaaaattttagaaaattagaaaaaattggaaaattagaggatcaatccaggaagtcttatgcccgaaaaacaggagttcttagaaaagaagaggaagaaataataataaataatccaacagcattttccggatcttgaggacatgagtttctatactgaaaaggcccattgagctccaatacaatgggaagaattaagcgtatgccacagagctcaccatcatgtatactggtgacaaagagtctacaaccttctagagagaaaacatgtcacatacaaaggatcagaaatgcgaatgcttccagactgagcaaaagcagcaatggaagaaagaaggttattaagcagtgcctttaaaattctgaaggaaaccatgctcagcctaggagttcaatattctgcccaagtttcaatcaacgagagggcagaggagaataccgtgacatacgtggcctcagaaattgacttcccacctattctttctcagcaagctaaagcaagacagcaagatgtgtccttggtgaggaagtgaccaaaagaaaggtagactcaagataacagaatgtccaatacaagacagaggaagagaatcccagggaatggtgaaggaagattccaggaagacagatgtgccttagggatacaggaaaactcaatccgcattgagacaggtccaggagggattaattcaagaagatgaaattcatttacatgatgtgtggttcaatattttttggtaatatttttattttaatatataacagaagaaaaaaattagcacacaaaactcataaatgtgatgtttatcactgcttaggatgaggtttaatttttttttaatcaagttaagcaaattttggttcaatatcttaacagacaaactaggaaagtggcagagtattttgaattcgattgggtacgtagaaaacaagcaagccaaaacaaggcaattattaactccagggagaacaaataagtgtgcagggaaaccagtaattatagtatactacccagattaactccaaataatatggagtcaaagtgtaatataaataataagcatttattaatatgaataaagggagggaggggaaatggaaacggaaacatagctaaattctcattttctgtaatgttaatagctaatatttaaatttttttaattaagtagtattagaaatatggaataaataccagaaaatcagatataagacaccattaagctgggtgcagtggctcacgcctgtaatcctaacactttgggaggccgaggcaggtggattacctgggctcacgcctgtaatcctaacactttgggaggccgaggcaggtggattacctgaggtccagagttcaagactagcctggccaacatggtgaaaccctgtctctactaaaaatataaaaaattagctgggtgcagtggtgcacacctgtaatcccagccactcgggaggctgaagcargagaattgcttgcacccgggaggtggagtttgtggtgagccaagtacgcgtcactgcactccagcctgggtgatagagtgagattttgtctcaaaaaaaaaaaaaaaaaaaaaaggcaccattaaagacatacaaagataaaagcacacctgggcactgacatttgtagcagataggaaaaagagtgaaaatctgccttcacacacgtgtgtatatgaagttcctacaaataaattcaaataaatagatcctaatacaaaaatagccaaggaatatgaacaggcacttcatgggagagggatattaagtcttactagcagtcaaggaatgtaaattaaaaccagaaggagataataatttgtatccaccagtttaacagaaattaagacacctaccaggaccaagggttggcaagggcatagggcaatgggaactcccatttgtgctagtgaaatttccaaacatgcacaaagagactgcacaagcatatttactgaagcgctgcatgtaatagccaaaaactcttgtttgtgggacagcttaacataatggtggtatattcaaagaacgaaattctccattgcaaaatsatctgattccgcatgtaccaacatgggtaagctccagacataatgatagagtaaaaaagcaaggctgcctgtagtcccagcactttgggaggccgaggtgggtggatcacctgaggtcaggagttcgagaccagtctggccaacatggtgaaaccccatstctastaaaaatacaaaaaattagccgggtgtggtggcagcctcctgtaatcccagctactcaggaggctgaggcaggagaatggcttgaacccaggaggcggaggttgcagtgagccaagatcgtgccactgtactccagcctaggcaacaagagtgaaactccatctcaagaaaaaaaaaaaaaaaacctcaaaaaaaaaatccaaacaaaaaaagcaagtagcatcaggatatgctcagtataaaaccatgcatgtagactgaactaagcaaagcagcagtattatatattgtatggggacacatacatgtagagtaaaaatgtgaaaatctgaacaggaaaggaatatcctcacagtaaaaaggcagttacctctgctcatacgtttgttgacttgtaaaagcttttttgtttgtttatgtgtttttgagacagggtctcgctctgtcaccccggctggagtgcagtggcactatctaggctcactacagcctctgcctcccaggtacaagtgattctcgtgcctcagcctccagagaagctgggtctacaggcatgtaccaccatgcccagctgagtttgatatttttagtagaggcggggtttcaccatgttgcccaggctggtttgtaataactttttacttgagttttagttaaaatgggtaccagacaatgggagaatggcctgtgtacaatttgggtagaatttaacatctttgaaatagtatattgtgtcatctgggaagatggcatgactttctactcattcaggtcttctgtcgtttgctcattattaatcaacttttggattttttttcattggataattgtctatatatccatgtactaattacattttcgtggcttaggagtcagggctttctttctatcaggacctattgaaattgagcttttgctttgtatttgaagatgatgtttttttagcgggcagattttagctatccaatgttctcctcagagatagaagcatgtgtttataggcatgtgtgtctgttttctctctcatgtttccccacatttccccttgtgccccaggcacacaatgagtggcaccttttggaagaattgattatttcagaaatgcagagagctggaacaggttggcccaggggaagccatggagatcagccagcttattaacactgacttgtgaaagtttacaagtgagccaggaggtgaggggagggtaaygccagtgaaatgttgtcttcaagagtattcrctatttctttcccccttggattacaggaagatgctgaaactctgtggagagacggaggacaagctggctcaggagctgatacattttgagttgcaagtagagagagacgtgattgagcccctgtttttgctggcggaggtaagcagcaggagtgaggccaggcctgaaagagcaaggaggtaccgaacaggagcccctcaatcattctgtttccagcattctacttctttcccttaaccttctccccaacattgtttttcatcagggattcttacctaamcacatggtcaagattcccaaatatgtcctttyagcatttgctaccccttctcctacccattctcttccctgcaggcattcctagaagtaaggtggaaagctggcagcttacccgcttccccacccacagcctcgactgccttcatccccaccttccacccatctcaagtcttcagtgctgtgaacagcagccactccttactaggattctgggggcccaggcctcctgcagttttatgttttttttttgagatggagtcttgctctgtcacccaggctggagtgcagtggtacgatcatggttcactgcaacctccgcctcccaggttcaagtgattctcctgtctcaagcctcccaagtagctgggattataggcacccaccaccatgcccatttaattattatatttttagtagagacggggtttcaccatgttggccaggctggtctygaactcctgacctcaggcgatccacccgccttggcctcccaaagtgctgggattataggcgtgagccatcgtgcccagctgcagtgtatgtttatatgggtcccttgtctttggactttaaaggacactcaattaaactattttattaaaaagcaaccttaatgcctatgtgaaaactttgctagcttcagccaagtgaaagcttctcacgggagataggaaatgcttggggagctttgaaccctgaatccctctcagttgtttttaattcgtcatctgttaatagattgagcatctcaaacctgaaacaatccgaaatctgaaatattttgagcaccaacatgattcttaaaggaaatgctcattagagcattttggatttcacatattcggatttgagatgctcaaccggtaaatatgatgcaaatattccaaaatcccaaaaactcccaatcccaaatatttctggtcccaagcatttcagataagggacactccayctatataaaatctaaccagcactatcccctagaactctgtattagtcagggttctccagagagagagaaccaacaggatatatgagaggggtttctcccctattaggggaagttgggattctcccctattaggggaagttggctcacataatcacagagggggagaggtcccatgataagccatctgtaagctggagaaccagagaagccmgtagcatggctcagtccagaaacctcagaacccgaaactcagtccaggaacctcagaagctgatcgtgcagccccgaatatgaggtggaaagccagagagacccccattaaatgtcaaagaacctggagtctgatgaggggaaaaggcatctcactacgggagggagggagagagagagcagagagagaatcctccttcttccacctgtgtgtttcagctaattggatggtaccgctccattgtgggtgggtctttctcccagcctgctgactcacacattggtctcttttggaaacaccctctcagctacacccggaaaaatacgtcactagcctttgaggcatccatcagtccagccaagttgacacctaaaattaaccctcgcagactccctacaatgatggaaatattctcaatctgtgccgtttgatagccactgcccttaagtggtttttgagcaccagtgcgattcaggaactcaattttttagtttctttaattttcgttaatttaaatttagaatttcatagctacgtgcggttagaggctactgtattaaactgccttgccctagaccctgtctggcttcctctctgaaccacaacgagcacctccacatcccctgacactctctctgggacagaggtatgggccggtaattacttatggacctgaaactattcaaggagaaaatcgtggatgaagttctttgggattgaccagctctcagcttctcaagtcatctcctcgcttggagcattcacgaggtcccctctgtgcctcaaaaggagggtcccgggtctggccaaagcctaaagcaaaccaaggagcaagtccgttgtgggtgctgacagtcacttggctcaagcaagatacccagtggccctccagcttagcttcggagctgggtggtgactcaggttgcctggggacagttacacttctccttcctactggaagttgttacacgcagaacattactcatccctgctcgggagagtgaatagaaagcacttcagagaacattggattctcctcgaattttttccttatataaaaaccgcagcccgagatgattttagttcaattttcggccaattttcgttttgcattctcacatcctgccctacttttgctgggcccggaaccaaaatcctgcactgggatgttcagtgaagccatttttagaatgaaaaaatataaaaagagcatctacatacaaccaaaatggaagaactcgtagccgagaaaagccatgatggcaatgtttattcattattgactggaaaagtcttactttatttctataaatataaacatttgcttcctttctttttataaatatagaatctgtatcctagatgcagccatagcctctccacgctcttcctccttcagctgtccrttttgcctcaggtctgtgtcagacatgactgcgtggctcccttcatttctacccacttttggcccttctggaagtaaagagggatgtggttgagccctggtttttttttggcagggcgggagttgggggcaaggtgagggcaggaaagtggccaggcctgcatgagcagagaagcacaggacctgtgagatggtctggcttgatggagagcctggctggtgtccagcaaagatggagcagagtttagctcaggaaagggcatcaataatttcatctgatgttggtcaaagggtacaaagtctcccttaagcaagatgagtaaattctggagacctgatgtgtagcactgtgtgacgatggttaatgatactgtattgtagacttgaaatttgctaagaggatagatcttcagcgtactcaccatcaaaaaaagaaaatagaaactatgggatgtgatggatatgttaattagcctgagtgtagtaatgatttcacaatgtgtgcgtatgaaaccattaaaccgtacacctgaaatatatacaattcctattagttagacctcagtaacacaaaagggaaaaaaggatttcatctgaaaataaggattgcgagaccgctagtaaacttgttgggtgactaccaatagttctttaagaatagttcttcttttttttttttttttttgagacrgagtctcgctctgtcacmcaggctggagtggagtggtgtgatctcggctcactgcaacctytgcctcctgggttcaagtgattcttctgcctcagactcccgagtaactggaattacaggygcatgccaccacatctggttaatttttgtrtttttagtagagtcrgagtttcgccatrttggccaggctggtctcgaactcctgacctcaggtgatccacctgccttggcctcccaaagtgctgggattagaggcatgagccaccgcgcctggccaggaatggttcctaaagaatttatcttgagcttcagtttaattgtatcttttatgttgtgtaaccacaggtggaaatcccaaatattcaaaagcagaggaaacacttagccaagttggtgctggacatggattcctcacgaaccaggtagaatctctttactttcttttttgcttctttgaagggacagtgatcatattttgggcgggtgggttttaagtaggcaattgtgttttcattcaccaagtttttctggacacctaacgtgtaccaggcactggaggtagtcacagtgaactcgagacactgggtccctgttctcatgaaggctgcagttgagttttggaggtagacactaggcaagtgaagaaacaagacagttctagaaagatatgtcatataaaaaatgtggccgggtgcagtggctcacacctgtaacccagcactttgggaggccaaggcgggcggatcacaaggtcaagagatcgagaccatcctggctaacatggtgaaaccctgtctctactaaaaatacaaaaaaattagccgggcatggtggcgggtgcctgtagtcccagctactygggaggctgaggcaggagaatggtgtgaaccggggaggcggagcttgcagtgagccgagatcatgccactgcattccagcctgggcgacagagcaagactccatctcaaaaaaaaaaaaaaaaaaagtaacacagggtagttttggaaggcgatgatggagaaagggagcaacagcattaaggataaaagagaaaaagcttttttgaggtgggtcattttggtcttagacttagatgatgagaaggtggcagccttacagagatctggtgcaaagcatctatggcagagggcacagcaaatgcaaaggcctcttcaaggcacagaaggaaggtcggcatggctggggcggaaggagcaaagggaagagaagtaggaggtgagagccaggaggtaggatggttgctatgtcctgtccattacaggaaatttcgcattttggagactcactcaccttttcctgaagctgatggtgtaggtgtctgctttctgtagcctttctcttaacttgagtcctttcagagagcagtcaagtacctgtaggrctgttcttccacacccatcttccagagtccaccagaaaattcctgtagtagcaggcgggtgccaaaggccctgagacagcattgcctgtggctgtcagagcaggaattgtgcacatatgtccttttattttttacagtgggatatgtgtatataagttgaaaaaggcaggtgcgtgagtattaatatggaaagaactatttggttctaccttaggtttttcgtagaccaactttatttttttatttaatgtattatttatttatttatttttgagatgaagatttgctcttgtcacccaggctggagtgcagtggcgcggtctctgctcactgcaacctccgcctcccaggttcaagtggttctcctgcctcagcctcctgagtggctgggattacaggcacctgccaccacgctyagctaatttttgtatttttagtatacacagggttccgccacgttggccaggctgttcacgaactcctgacttcaagtgatctgcccacctcagcctcccaaagtgcygggaaatttttattatttttaaaaattttgagacaggatctcactctgtaactcargctggagtgcagggatgtgatcatagctcactgcactcttgaactcttgggctcaagcaatccttctgcctcaggtctcccaagtagctgggactacaggcatgtgccactacacctggctaatttttttatttttagtagagacagggtctcactgtgttgcgcaggctagtttcagactccasagtaggccaattttaatcatcttcacagcttgttttcattttcttgaaataaagaaacagaatatatttgggcaaagagatgtagcatacagagttcagaaggtcagatttcaaggttcagatttcaactattttctagatatgtgaccttggtcaagtcacttaatctcccagaatatcattttcttcacctggacgcaaggagtaacattcgtgggtggctgttttgagtactaatatcacttcccaagtgctttataaaaagaagctgatactgtaagtaattgttgcactggaattctgcatcaggaagaataaaaggtacagagcagtcccccaagaccagacataaaacaggttaaaatcagcaaagaaacaagggtttctttggttaacttacttgtccccaaaccctcagtccacctgaatgatttttgccatctgtgtcgatacatcttttaagagagttgattactttttcaaaataaatatattttgaaaagaaatcctttcatgctaccataaattggaaagcagtatcctttgctacaaataccaggtaagcataaaagtgaacagatgaaagcaaagccaatgttactaaattttagagcctgttgactgtggaagaatgtcatcctgaagctcatcttcctttgttaaaaaagaagaaggggaggcgaggcgttaggtggttttaaaattattctgatgcaaatatgagactaacctctttagcgtgcttggaggaatagasagcagaatgagtgggaagtactgatttgctattacctctatgaccttgtgccacgtaaaattgcatcccataatatgagtgttcaagtaccctattttgggagtcatgtaagatggctgaagaaatgcagattgccccattgttttcatgaggtggacaccatgctcctgggcagagtgacatccttctctgaaacctggggcttagctctgaagtcttttctttgcatctacaaagaaaacccacatttccaccacagagcctcttgttagcaggctgaatgctagtatcaaaccatgtcattaccatacatatttttgttttgtcttcttatgagaaggagaattattcctggtcacattgatggtccgttctcctgcctcagcctcccgagtagctgggattacaggcacctgccatcacactcagctaatttttgtatttttagtatagacggggtttcgccatgttggccaggctggtcacgaactcctctagcaggaacactagacaaagtctagagttatgttttcagtggtgacaccaagtagtctgtaggttctgcaaacgtacatgccacttggtgtcattagggacctctcccctgtgatttaacaaatgtttttatatcttcagcttatcatctcctgtatattaaaatctagtaaggaaattctaccccacccccatgcaaatttctgtttttataaacttcaacttggaccctttataacctttgttgttttagactaaaaaagtcttgtttgcattgttttcatataaacttgatccgtctcctttatcacatcggtgatttttcatagcccactttgtgcagttgtgagtttagggatagggaattgctttgggggattgtttgttttttcgtttttttgagacagagttttgctcttgttgcccaggctagagtgcaatggcgcaatctcagttcactgcaacctccacctcccaggttcaagcgattctcctgcctcagcctcctgagtagctgggattatgggcgccaccacgcccagctaatttttgtatttttagtaattttagtagagacggggtttcgccatgttggccaggctggtctcgaactcctgacctcaggtagatccgtctgcctcagcatcccaaagtgctgggtttacaggcgtgagccactgygcccggcygctttgggggattgttgacagtacagtccccttgaaaactcagttgatttccccttcaggtgtcagctttggtaaccgtggcgggagatctaactyaaggcctcaagttatagattccccataagtatgagttataggctacaggatgaaaagggcatttttagcaaaggtatactctttgtttccgctttactctcagactggccatttctagcctgagtctacctgtcttgtaggaccttgccaaaagccataagaagccaacccaacacaacttcctgccattttccctaactcctcactcttagcccgtatgaggtctgcatcccaagatatagcagtgagagcaagaccaaatgctgtgctattgaacagcagggatcaccagctcctcttctggaacagctgggttctgaatgctccccccctaccccctgcatttctccataaagccaatggcacaggttagtttttcttccttgcagcatcctacttctgatttatttcatattgttctgtccttcatgaagtatgctctgcagcactgcaacagtgaattccacatagagaccctccgcctttcaagacaggaagtagatttgtatatattatcagcacatcttgaacaatagtcccatgactggatctttaatttctgccacaattctgatggatactgtcaaatccaattaatttatctygtgtttaattagatcccaataagatgtgtatgtttgtcactattgaagtaaatctggcttgtctgcttcaaaagccaatgatacagacctcaatattctcagagaaactgatgcttacaggacgctttatgctgaattaaaggttgtgaattgaattgaatgatacgcaaatttcttttttgtgtgtgataggtttggtttagcagtgcttaaagaaggagcctaatttttctccaaagtcagcctgacttttttctggtcatgtagctcaaggttaaccctcccgagtctgggacacatacacattccatttctgccgaaccagctgcctctgggtcctagggactgaatggtatctctccaaaatttgtatattgaagcgctaacccccaatgcgactgtatctggagataggttctttaggagaaccttattaaggttaaatgaggtcataagaatgggcccctatttcactaggattggtggccttatagggagaaagagtgatctctctctctacacgcactcagaggaaagctgtgtgaggacagaaacagcagccatctgcaagtcacagatagaggtctccagcctctgtcttgatcttggatgtccagcctccagaattgtgagaagataagcctctgttgtttaagccacccagtctgtggtactttgttatggaagccctaccttctttggaagcaagtgaactagtgtaagtaagacaggagggttttggagtggaaactgtgcaggctatggagttaagaagtggaattctggaggcggggcagtgtgaagtcttgttagaactggcagtggagtctcgatggccatcaaaactcattcctcatctctcacccctccccatacaggtgtctttttctcacatctgatttcttcaaggtcactggatgtcgcatgggctcatgtctccccactatgagccctcttccttttgccccaattccgaaagtgccaaagagggactccatttgtctggactttgctcatatgcccacttccatgactcgtcagttgggtcagtgtgaggaaggatggcacaggcttgacttggatcagaggccctcacctgggccactcactgcctgggtcatgcagaacctggcagtcccctttttgaccacacattactgcagagtggaagcaggaacttaaaaagtgggggatgcccatggcagaggaaggggcaagactagacagaaggaacagtgaatgccccaatgaagacactctcctgtctgccttttaaaattcttcttctggacattctgttgtcctgaactgacctgcatttgccttctttacatattcctggtacctgaaattttaaacccttattcctctcccttctctctcatctctcccaaggcttcattaaagcttgtgtcccatcttcatctcccccagatcacatagtcacaagtcctctttccccagagaaggatggtggtacatcagctactttagtgagaagaaatgatccttctgctcttcaactttcaaagctcaaagtttccttggacaatgtctagtgttcctgtttctcctctgacagagcagcccaactcttgagtttatgtgtagaacagaggtctgaaaagactaccaaaccttgaaattcataattcgtgttacttttcccaaaatgactatctgtacaaaattttcccaacatgactatctgtacaaaattcatgtcaccttttccagcatgagtatctgtacaaaactcgtctgttcacatgacaagagtttaccttggtattttgtttgctatttatgttccacaaagagaacatattttggacatcttgtcactgttttaaaatatcaaaatagaccaggcacggtggctcacgcctataatcccagcactttgggaggcgaatgagggtggatggcctgaggtcaggagttcaagactaacctgaccaacatggcgaaaccccgtctctactaaaaatacaaaaattagctgggcatggtggcatgtgcctgtaatcccagctactcgggaggctgaggcaraagaatcgcttgaacccaggaggtggaagttgcagtgagctgagattgcaccactgcactccagcctgggtgacagagcgagacttgatatgaaaaaaaaattatatatgtattatatataatatatattgtatatatataatatatatgtatatataatatatatgtatatacataatatatatacatatataatatatatawwatatgtatgtataatatatgtatatatattatatatgcatatatattatacatacatatatattatatatataacattgtaaattgtaaataaaatttcttataaaaaggggaaatgtatatgtttttaaagcatcaagatactgactacaggataaaatctggaggaaaaaatagatgagaataaaaagaaaagaaggaacttgggaaaatgtcttcattttaatatacctatatttagtatgattctgttttttaaaaaatttaatcctgagttacaaagccataaaaatctacttagtgtttgtagtcactttatatatattttaaacactttcatattggttagttattttttcttcaggtagcatgagtcagatggtggttctaacttaattccataatctaccattgtgttgtagttattgtctgagatctaaattacagccatggcatctcgtattttattctccaaaactccacaacactttaatactttatttgaaatgattcaactgggagagtattaatcaaatatatcacttgtatagggtaaacctttataagaaaaaattacccaggaattcttcctaatcttgatctgttatttttttttcaacttagatgttgaaacatctttcagtagaatatttcctttctagtttgccctgaattcttatcttggaatcaggaatctttcagagaacatgtgttcatctctggagcttcaagccagcttgatgtctcaaaacctttttaaagtaattttcccgtgattgcattctttaagtgacagagaatcctcatttttgctcctttttgctaacagcaaggagacttttagtttccatttcttgtattatagagccttgcattcttctgtttttcctgcagatagcaaaagagaaaagaatagtggagtagagaaaatactaaatgattagattcttgactcttgacatgagaatgacattctactttctgtcctcgcatcagaggctgcagactgatggtctgagatccagatagagcccccagagctctcttgtttggtctgtatgctgttagcctgcatggtttttaaaagaaattatttgttgccacatttcacttgggagagttcacataacaatttcctccttctctagtcagttgaaacatctggcaacccatgacccagcttcctgcccacctcagccccatcagctggagctcatgaacagctaccctctcttaaacaaggcaggatccctcctaccaagttcccagctccccctgctcccgcctgacttcccaagactaaagccagccttggctgctgtttgtcctcctgattacaggattgtttttcttagagctgagaaatagttttatatttcctgtctccattacaagtaggaaatagaggatcgtgcggactagtttttaagataatggcccatttgatttattttatttttttttaacttgctggcctctataacccattgagtttacagactcaggagaggaacccactgctgagacctaattcagctactactatagcataattggaaccatctttccaattatgcctacttttggtaattccctgctgataacacagcagccagaaatatttgtatttcctcctaaagttttctgagtgacttcgttagaaggccaaatttttaagaaaacattcatgaggaatctaaatgttgccataaaaattgttttgggcttaccagtggagatttttgctatcagatttgtttttaatcttaccagcatgtcttctcacttagcatacgtcactggcttcaagccaagaaggtgaggatttccatactcaaattcccacaggataggcaggggacttaaaccaatgatagagactgtgcttaaagggcagtgatagttattttgaaatatataatatacagtatattactataatcaccctgattaaacttcagatgtctcaccacagaaaatcatgagtaagtgaggtgatggatatgttaactagcttgatttaatcattccatactgtgtgtgtgtgtacatgtgtacatatatcccaacacatcacattgtacccataaatgtatatgattatgatttatccattaaaaataacattaatttttttaaaaagacagcagtagtgattgccatttggctttagtgtttggaagacaatagagaaaatagtgacaaaccaggggatgctcgtcctatctgaaggggcagctgattctcagcttcagtaagcagttgackcatggaaatatgggcccactgtctccttgcctagtccttggtgccttttcatgacctcccttttccagtgagggtatgtagttccctgggtgatatttgtaaccagatgttttctcagtgctcccatgggatccccagggctctacctgtctcacatctctttttctcctattttccatcaggtggcagcagacttccaagtcttcaggtttgtccagcagcttacagcctgcgggtgccaaggctgatgccctcagggaagaaatggaagaggctgccaacagagtggagatttgcagggtacctgccctctttgctcctctctactgggacaggctggggagccctcagggattccctttttgttcactggagttctcttaaaactctgtcagtgaggctctagttgaactgaatgtccccaagcccgccggctagcatctccaaggagtccaggatgaacccaaggagttggggctttgatggtgacctagacagggaggcagcattcatttatcattggtggtcctgcatgctaggcaaagaggaatgacctttatttctgtgtgaagcttttgtaaatcatctgagtcccaaagaataaattctaggtgacacaggacagttgagaatttgaccatagatgagccttgactcactgttgatacttagttatttcctttttggctgcgttttgatatttcctgagttgctttatccatcctatgcctcctggaagacacttatctatgaagttgaaatgctagccatgaaaagagtcacagaaaagaaaacttcccacttgttaagagagaggacatcgttctgaaaactgcgactctgtactcgtgtaatgatgtccttcgttgtactcattcagatgtttcccatctccttttcttgcaaatatttcacrggacttaggtagcaatagaccattcacgatgctctgtgtatatgtacatctctttacctgcatatatgtcagcttgggtttctaaggaaaccaaaactctatttagacccaaggaacaaaaacatcacatttctgtaactattctgggaacctgtcctaatcacatccagttttgaaggagaataaccagtttgcctgtggacatctctgttcttcatggctctgtctagtcttagcttgtccataggctttttctcttacagccaccctgtgcaagtggctttgaccttgcattcaggtgacattcagaatcagggagaatttctctctagaattagaaacattgaaagatttttaaagaattcattatctcccagcctacagtactatggaaccaagcaaagtaagactagtacttcatatgccagattttttgtgagtgcagctgatttgtcatttgaactcctgcatatatgccaaatatctggcgtgtgtggtattcctgaagcataactcttctctccttccaatttcatttttactgtgttttctttttttattcttttctctctctctctttttttttttgaggcagagtttcgttcttgttgcccatgctggagtgcaatggcacggtcttggctcaccgcaacttccgtctcccaggttgaagtgattctcctgcctcagcctcccaagtagctgggattataggtgcacacaaccacgcttggctaattttttttgtatttttagtagagacgggggttttaccatattggccaggctggtcatgaactcctgatctcaggtgatctacctgcctcggcctcacaaagtgctgggattacrggcgtgagccaccgtgcctggcctaccgtctrttttttaactatctaccatggatctatgttcctctgttaagaattcttttttcttttaatttctttttcaatagacaagagagggtggtggtaagcaaggatgctggatgtgaatatccaaatagatcaggataaaagttcagtagctttatccattcctgtctagcttatattcgctattgtgccaaaaatgtattcatttcctcttcaaagattcgtagtacatgttcagcataatgagttaaaaaatacaaaaatatataaagaaaaacactaatattctctcccttcctgtccagcaacctttctgtttccaaacagggtagaaacctccccaccaatatttgttaagacttcattatgacaatgcactttgttaggtgccaagcagccataacagttataaggataaggaagccagtgctagatagaacctgttatatcatactccagacttttcttcataatcatacatagtcatagcatttttctagttatttatatgtttgtttgtttttgttttgttttgttctgttttgttttgagacagagtcttgttctgttacccaggctggagtacagtggcgtgatctcggctcattgcaacctctgcctcctgggttcaagcaattcttatgccttagcctcctgagtagctgggactacaggcgcatgccaccactcctggctaatttttatatttttaatagagacagggtttcgccgtgttggccaggctggtcacaaactcctgacctcaggtgatctgcccgcctcagcctcccaaagtgctaggattacaggtgtgtgctaccacgcccggcctatatgtttgtttttaataaaacagtcatattatttatattaatctaccatttaattttctcagttaacaccacatcctgaacatctctctaggttagtagctgtagttctaacttagtcttttttatttatttattttttttgagacggagtcttgctctgtcacccaggctggagtgcagtggcgggatctccgctcactgcaagctccgcctcccgggttcacaccattctcctgcctcagcctcccaagtagctgggactacaggcgcccgccaccacgcccggctaatttttttgtatttttttagtagagacgggatttcaccatgttagccaggatggtctcaatctcctgacctcatgatccacctgcctcagcctcccaaagtgctgggattacaggcatgagccaccgcacccagccgttagtcttttttataaattgcatgatattccacagtagggatacacacacacacacacacacacacacacacacacatatcatgatttatttagctattttcctattaatggatgttcaaactggtgtgttttagttttagtttttggcattcccaaaaatgatacaataaatatatacttatatgtatatccttataccctggtaattttttttctataggatagattccaagaagtgacatttttaggtcagagtctatgcatacatttttaaattttcatacctattgacagtttacttctctgaaaaggaaattgcattttacatttcaaccagcaatatataaaattgcacatttttcttcatctcgtaatgcatgttgctcctattttcaatttttgccaatttggtgagggaagaaaaactacctcttcactattgtgttcttaatttccctgaatataaatgttgatgagtatcatgtatttattggacattcttcatgtatttatacacattcttaatttggtgaattgcctatttgcattggcaattggcccagtatttctattgcttttctaaaatatcaatttataaaaattatctatgtatcagcagttttaaacttttttctgcctgctgtgctgcagataccttttccagtctgccatttgtcttttgactttatgttgacatctgccattaaaaatttaataatgtgtttcctttgcatgggaaaagatcctgggtagccctttggacatcttctacacaaaagttaaatgatttttcttctttaattttatgttaatgttttaaattcatgttatacacctattttatatactttaatacatctgaaatttatttttgtatatgatgtgaggtaggggtttctttctttcttttttttttttccagatagatagtcagttatgccagcatcatttgttaaataagccaccttcccctgaagtgaaatttcactatctaattactctaatttatttctggactctatgtttcattaatctgtttgcctgcacctgagacgatagtatacagtttctattctaatgatttcatagcaaatataatcttcagtaaggtagcccccactcctttttttgtagttatcttggctagtctgttacatccattttattatatgaactttgaaatgatcatatccagttcatgaaaccctacattgtgctcaagggagtctcatttgtgtgctgaactgacctccttgagagtgcttaatgctggttttgttaaagttctcttctgattattcttttatttttactttgttggttgccaaccgttttaaatatctaccttggttttcctacctccccttgctgggtttcctcgaatgggttatttcccctgatctcttcatggttttatatttcctcagcaggcaagtgtttgggatctcctatattgtggcaaaccagccaagtgccagtttgtaggctgaaagttaatgaagtagtaatctgattcctcttttttgaggaccaagcagagctccccagatctttgggaaccagagagatttagcccaccaggaaaaccaagtcaagatgtgttccataagacaaaacccactgagccctcaggcaggcttgcaggtgcagcactgccttcctgtgttctttcaggagcccatccaaaccctgccttcctccctacttcaagatgagacaagcccaactcttcacaagtggtacttkctttctcttttcttcccaaggctttctataaaagwcccctgaatcaatacatccaaggaagtataagtagttggtaatttttcaataagaggagagaaagtgaagaaggacctgtgagcaatgatgtaacaatagagaagacagtgaatagaaacctaatccacttggcaacagcagtatcagtttcattttgcttcgtacaggagactggctgcagtcttaggattttcactgtaaagtgacactttccatcatcacctttcctgcttttatctccccatatttcatcacataamttcttttttttttttttttgagacggtgtctggctctgtcgcccaggctggagtgtggtggcacgatctcggctcactgcaagctccgcctcccgggttcatgccattctcctgcctcagcctcccgagtagctgggattacaagcgcctgccaccatgcccggctaatttttgtrtttttagtagagacrgggtttcaccgtgttagccaggatggtgtcgatctcctgacctcgtgatccacccgcctcagcctcccaaagtgctgggattacaggcgtgagccaccgtgcctggtcatcacataaattcttatccttgcttcacccacgtctctgtttttctcatttagccttgtcctctctctcttttagtttgtatctcttcttttccattttatwcttcttcaatgtataatctttcctttttgaaagtcaaacttgagtctgggaaagacaacaacagcaggacagatgtctagctcattttgtcctccccacaatctgaagagcacatatattgttagactaaaagacaaccttgagtctgaacctacaattccttactacaaaattagtgccatgtcatgggaagtaaatgagatgctggaagaacccatcagtactctctaatttggaaggctgtggaatggttgggaagcatttacgttacttcagatcccttctgccaaaagtatctagcccagcaaacctacgagcaagcgtggccacacccagtgggaagccaactggtggcagagcttccactggtgtggatttttctgaaacaccagtggaaggataggaataaataggaggagcacagaggacttgggggcaatgaaattattctctaggatactataatggtggatacattgacatacatttgtcaaagcccccagaatatacaacactaggagtgaacccctaagtagactatgaactatggaagacaatgatgcaccaatacaggtttatcaattgtaaacctgggctgggaccttccttggcgtgtcaggcaggagtaccacaaggaggctggacacagccagatcatttacctaacatggaggacagaagacatcatgtacaaagatgttctttggtctgttagcttcaacaaattcaaataatttttattatgatttctgaagttgcctgcaggcatcctctgtggcagcagccccacaggttctgagtcactaaatttatatcggacagaacttagatctgagaagattctatcagaataggcaggaggggcaggaaagagatgcttaccattttaaggtcaaaaaataatcctgaatagattacttttctatgttgaagataataataaaatactcaaaaagagaacactttaaaaaaatatttacttatgataacaataaatttcagacaacatgtcttggtgcctcaaatacgattaaagggcatatgggccgggtgcggtggctcacgcctgtaatcccagcactttgggaagctgaggcgggtggatcacctgaggttaggagttcaagaccagcctgaccaacatggtgaaatactctactaaaaatacaaaaattagctgggtgtggtggctcatacctataattccagctacttgggaagccaaataaggagaatcacttgaacctgggaggtggaggttgcagtgagctgagattgcaacattgcactccagctggggcaacagagtgagactccatctcaaaaaaaaaaaaaaaaaatcaagggaatatggattttaggcaccaatagataaaggtgagataaaattgtcaagtaaagtggaaagggaactgaatgagattaggaaatattttttaagtagraaaataatgcaggtatggaatcgattttagtaaacaacagaattgacactgcagaaaggtgagccaaygatgtagagaaaaatttgagaatttcttctagaatgttaaggtgagagccaaaaagaatgaaagaaaagatggcagatgttgaagataatggaaaaccaatgtacagataataggggatcctgaaaaataagccaaacaaatcagaagagcatagaaaaataaaattgacttgcrtcaaagatctcaatctcaaatctgtgattctgaaaaacagagattttgcacttttctttacctttgaaatgattttttaaacaaacgttcttaaatcagtaaactttattttttagagcacttctaattttgcagcaaaattaagtggaatacaaagaggcctcccatatatgtcattcccccacaaacatacaacctcccccaatgtcaacatcacacacacagtggtagagtctgttacaattgatgaacctgtattggtgcatcattgtcttccatagttcatagtctacttaggggttcactcctagcgttgtatattctgggggctttgacaaatgtatgtgaatgtatccaccattatagtatcctagagaataatttcattgcccccaagtcctctgtgctcctcctatttattcctccctgctgacccttgacaaccactgatctttttattgtttacatgcttttgtcttttccagaaagtcatatagctggaatcctacagtatgtagcctttccagactggcttctttcacatagtaatatgcatttcagtttccttcaagtcttttcatggcttaacaactcatttctttttagccctgaataatatttcattgtytggatataccacagtctatccactcgcctactgaaggacatttttgtggctgccaagtttgggcaattatgaacaaagatgctgtaaacatccacatgcragcttttatgtgacatacgttttccattcatttgggcaaatgccaaagagcataattgcctgatcatatggtgagagtatgtttagttttgtaagaaactgtcatactgtcttccaaagtgactatactctgyattcccaccagcaatatatgagaggtcctgttgctccacatctgtgcctgcatttagtgttgtcagtgttttggattttggccatttcaattaaggttctgatccttgttcagtctgttttttgccttttactgtgtttgtaattttttgctgaaaggcggacatgatgtattataaaagaaacagcggtaaatagttctttggtgatgtggtaaggtgtgggagaaggggaagcattcatagtgctatgatcggtctctttcttttggtgagcctgtgccttagggctgygaatttcaccagtgcctctcattttgttgttgttttaattattattattcctttcttaggtgggacagaattgctagagggggttggcgttgagtatttcccttcctcttggtaggttaggcaattttaaaagcccartagtttaggcttgggtaaaataatttctctttaggggagaccttgttaagaatggagtactctagtatatttcaaaatggctacttttttcctcctggtgctgaaagcaggagaggatttttctctgaaatttcctgtgagaacctgrtcttagagctcctagaggtaaaagtgggtccccctggaggatttaactttcacacttgtccatgctgggcctccatcaactcgtcaattacagtactggttttcctgccccagtactgatttccgcagaggtttctgctagtatctttttacttcagtgagttataattcttgtgtttgcctgcctgtgtctccaattttcagggcagcagtttgctctgtgaactcacttcactgccaaatctaagagttgttgagtttcagtttgttcagctttttacctgttagtactgacttcaaagccccctgcgtgctggaccagaaactggaagtcaacaataaaaatcaaggtgtgattttcaccaagaaaaattatttaaaagaccagtatttataaatatcttggaggcttttttaaacaacagaatatttaaaatcctaccattggccaggcgtggtggctcacacctgtaatcccagcactttgggaggccgaggtgggcggattgcctgaggtcaggagtttgagactagcctgaccaatatggtgaaaccttgtctcttctaaaaatacagaaattaggtgggtgtggtggcatgtccctgtagtcccagctcaggaggctgaggcaggagaatcgcttgaacctggaaggcggaggttgcagtgagccaagattgtgccactgcactccagcctgggtgacagaaaaaaaaaawttctgccataaaatcatgagctattctaccacaaactcatgaattgtaaaatattgctaacaagatttgacaagaagacaatctttgacaatataatgacaagaagacattataaaattgagagttgtttctagatgagaagagttaatattataaacattttgaatttcccagaattaatttgattaatactgtagtaagtagatataattgtagtaaatttttcaaagaatgaaaaaagatttcaaaagttaatatggaagaattactagagctttgaattactagttcttaaaatacattatacagtcacatgattaaaacttaggaactatttcagaaatatatagatcagtaaaaaaaagacattccagcatgaagaaaatccaaatacaatgtgatttcatctgataaataagacattttcataccatagagcagtctgctcaattcatgaacagttctgggacatttggttagctatatatttaaaaaaaaaaaaaaaaaaaaaaaacagctgcctggtgggattacaggttaatttggttacttttatatttttctgagtgtggattagttgtaaaatcagaaaacaggatttttcaaaatgcattaaattctgttgattaattatgaaagggttttttacctttataaagaaaatttgctaatgatttagataaatgagaatttgatttatagtttccttacttgaagtgtgatttttttggaatccatattgttagcttaacaacacagtaatccaatcatgcctttaaaaatcctttcttcttcctgagggcacatatagatttttgtagggtcatctgttagagaagcacagatgccgagatgttgaaggtgtatttgatgcaacgtttagtccttcagggccttctttcctttcctctgtctactgagccatttgtatcacttaactctttgtttttctctgacttgaaatgtcctcctccagctgcctggctggtgatggatatctcctgagcaaagctgctgcggggaagacagacagggttgattcccaccttggcagcctacaaaagcattcatttaagggacctcaggtgaaatggagctgaggtgatgtttgagcccattttattattctttgggaaatttaccatccttgagccttgattttttttttcatctgttcattcagcaaacagttgtggcgcccctactgtgctaaacactttgagacagtgggtaacagacagataagatccttgaactcttgctacctatggatctgaaattggaaattcaatactaaacctaagagagttagaggagaattccttgtaacattgtgcctggcatctaracccagtgaatgttaacttctttattttttattttttttttattttgagacagagtctctctctgtygcccaggctggagtggagtgttgtgatctcagctcaccgcaagctccgcttcctgggttcacgccattctcctgcttcagcctccagagtagctgggactacaggcgcccaccaccatgcctggctaattttttgtattttttagtagagacggggtttcaccgtgttagccaggatggtctcgatctcctgacctcgtgatccacctgcctcggcctcccaaagtgctgggattacaggcgtgagccaccacgcccggccaatgaatcttaacttcttttactctttctttattctgtgaaactggaccaagcataacattgtctaatctgtacttcaagctctctggagaacacmcttcctcttttcactctgtgagtctgttctgttgccttgtgtacaagaactcttgaatgatgttctcagcaattgcttgcctgtcacagatactgaaaatgaaacatattgctcctgcaaatcccagtgttcttaatgagaataggcttaattagcagctagagagactgagggttatggggttggtgcagattgcttgaggtttcatggaagagcctcttcctgaagcatatagttacctgctttcattagttcagcatctaggtcagctttcttgtgctgttgccrtgtttgccccaacctgaacacgtaggctcttctctcctcaactgagtgcctcttctaaggatctgcagcctagagcagctgcacagggaggaaccttagagatcgtatgacttgagcaagcaagttcggataagtgacatgctcaaaaatatggttaatgacagagtctacattctgctcaaaatgtacttctattatgccaggctatgagtgattccatagaactgaaagctgttctccttggaggacaaaacattccagatttcaatgcagcattgggtcacccaatctcatggacaactgaatatagtgaaggattgataacaccattagatctgtgtgcagttttgcatgagtccagattttgccaagttttgagtcagcaatcctttccctgtgcacctgtcttatccaagcttcctccaaattggtgcatttccatctctttcccatatgcttgtgatcaaccaatcagtgttgagtcagtattgagaatgaagggaagcagaccagtggaatgatcaaagagaagaaatggcattatcaaaagagcaatagcacaatgtgtgcttggagcttgcttcagaataggggcacaagctgtagagatggatggaactaatttgcacatcactcctctacaccaactttgactttarctgtggtccaaatgtcaaaatctctggggaaatgactgacataggtgttcttttcaaacttacgcatttttcagagttgtggttgacaaatatgcaaatgcccatggaaagtttgtatcatatcaagtattaaaaaggagattaagcagtgtttaaggctctttctcacrtgatgtgttgacttatgcattagccactctccattggtttatgttttaccttggttgtatattttaccttgcacaggaccagctctcagctgatatgtacagttttgtggccaaagaaattgactatgcaaactactttcaaacggtaagtgcccagaaaggtgagattgcttaaaggctgttcgtrggagaagggaatgtgggcatggaattaagagtcccktaattgatcacatcatagaaaaaggtgggagctttgaccattttactagtgaaataaatcctgccatgctcctgatatggatttctccaaaaaccttagaataaaactcaatcccatccctcgggattattgcaactcagtccactgattctcagccaggaataattttgttccttctcttggtgggcagttggcaatatctggagacatttttgattgtcacagttgtggagggaggtgctactggcatttagagggcagaggccagagatgcttgtaaatatcctgcagtgcacaagacagcccccacaccaatgaattatccagtccaaaatgtcagtagggctgacattaagaaactgtggtctgtgctaacaaggggcttgagaaaaataggaaggcaattccttccccctgcacattttcttttttaatctagattttatgaaaggcagtgactgataggtatatgatgattgatgtggcctgttggcctgcctctcaccaatcaaagtgatttagacagtaagaaacaggatcagagtcatctaaacttgaataaactggtacaaataattaagactcaggttgtttaccagggtaaatgcaaagcaagtcaaaaaacttcgaaagagaaaaaagttcaaataaaaaaaaatcagttatgctcacctgcctttaaagttgggaataaaaggctaagacctaaaagctcttgatttataatcggggaaggaaaggaatgataaagaaggaaggtaaggagaggaaaatcaagaaattctgcaaagtttaaaatgctttgataagtatggtcaaacaactgtgggctgttagaaattttccaacatttcattagtggttcagaatgcagagaagccccttctactggaaaaggagttgatatgcattacttccaacttggaaagtttaattaattaatttatttatttttattttttgagatggagtctygctctgttgcccaggctggagtgcagtggcgtgatctcagctcaccacaacctccacctcctgggttaagatgattctcctgcctcagcctcctgactagctgggactacaggcgcatgccgccatgcccagctaatttttgtatttttagtagagttgtggtttcactatgttggccaggctggtctggaactcctgacctcgtgagctacctcacctcagcctcccaaagtgctgggattataggcgtgagccaccgtgcctggtggaaagtttattttaaagtggtagaattttttcaggtgtattccattggttgtattcatgaaggtaatatttaattttagaaactcaaagacattagagttttactgatgacctcattgacattccaagctttactagacagcctaattgtcattcggataccatttatttcaatattctgatttttaaaaaagttcgtattagttttactttaattttacttagagatattagtgtccaccctccacaacaagccttcaagcagattaatttcctctgttttccttatacatgcccagttttggggaagggataggaggagtcagtaaacaaatgaagtaactagtgtttatgagtttcatctgctcttatcaacatgttggccacttttaattaatgggatggtcaaaatagaatactttgaaggaatttgttctttggactgcatcattttcaccaaagcaatcccacctccagggtatttgaagaagattgcagatcaagccacaagttttctgatcagttatatgttaractaactttgcagaaacaaaagatgtatacaagttaatgacatttaagtcgtacatatctcataagtaaattatttttcatatttatttcaacaaatttgtttctattttaagagatggggtcttgctatgttgcccaagctggtcttgaattcctgggctcaagtgatcctccagcctcagtctcctgagtagctgggattacaggcatgagccatcacacctgactcagtaaatgtatttctaaatgtgttttccatttccacttgctacagttacccctttctttgttgccttttgcactgaggatgggktgccagaggaagaagggtggtgataaaatcaagctctctaagccacgttccagctctgaagagctccccctattcctgtctggttctcctgcttcccaartttccacttgtagtgactttgttgttatggaggctaaagaggaagcatgctcgttattttaggtagattggaggagggaatgggtgactacctccttccgcatgtggaagcacctttctgcaaaaygctttgcatgccatggcagcctgtgyccttgcccctcactaagggtgatgcttgccttgtgtcttctcagctaatagaagtgcaagctgaataccacaggaagtccctgacactattgcaggctgtattgcctcagatcaaagcacaacagggtaagtgcaggccttccctggagaagggagggccggggtgcctgcttgccttcccggatgagatgaattccttgtatgtcgttggccctaacactctgcccaacagcatcacctgtagatgagccttttggacttacttccaaactggtgccttgagtcgggggtgcgtaggggtgcccatagaacattaaccccagtggccctggaygcaattggctggccatcccccaccccctcctccagtcctcctgtcatccttaaaaccacagaatggaggctcaattgggcctccctctctttggtaatcttaggagaatctggacaacaaaggaaagcgagattccagcatgagtgaacttggcgaacagctgactgactctttctcactcctcccctcagaggcctgggtagagaagccttccttcgggaagccgctggaggagcacctcaccatcagcggccgggagatcgccttccccatcgaggcgtgtgtgaccatgctgcttgagtgtgggatgcaggaggaggtaggtctgagcacagccacacgccgccccgggcaggtctcctcttccacgagacagagcttacaggatcctctctcctgtaccatctccactccggcccccacgaatccaaatggyttaagacagtggctcagacccatcttctgcagaacacaaattgatcctgccttttaccgtgagccttcatttgacaagaagagagaattgtgatggccatgaggaacggmtggccatattctagtcattctttcccctggtttaacatgtttggataatttgggcattctgctattttttttttttcttttgagacagagtcttgctgtggcacaagrctggagtgcagtggcgcgatcttggttcactgcaacctctgcctcctgggttcaagtgattctcctgcctcakcctcscaagtagctgggactacaggcgtgtgccaccamgcccagctaatttttttttttttttttttagtagcaatggggtttcaccatgttggccaggatggtctcgatcccttgaccttgtgatccacctgccatggcctcccaaagtgctgggattacaggcgtgagccactgcgcccgaccctgctgctattactactccttctcctttctcctcctcttcatcttccttctcttcttctgcctcttcctcttgcttaataagttacctaattttaggtaattttaaaggttaaggctcttaaacttttttatcacaactcttatagagatcctgaaaatatgattgatagatatattagaaagtactttttaagagccacatgtaaaaaatgtctatgagaaatttttttttttctttttgagatggagtctcactctgtcacccaggctggagtgcagttgcaggatcttggctcactgcaacctccgcctcctgggttcaagcgattctcctgcctcagcctcagagtagctgagtttacaggcatgtgccaccatgcctggctaatttttgtatttttagtagagacgaggtttcaatatgttggccaggctagtcttgaactcctgacctcaagtgatctgcccacctccgcctcccaaagtgctgggattacyggcatgagccactgcacctgacccaagaagttcttgataagtgttgttttattgctgtgtaaatcatttcctgggagatagagctcatctttggtttcttccatagactattttaatatctttactccgtcttcctttgatctgattagccaatcagtatttatttagggcatgcggtacgtgttttattgagcaaagtatgaaatagtgagataggagacttataaacttattgccggagatgaatctagcatctctcagttaagcctaattcatccagaacagtctgtaagtctctaagggagcactaagttatatgggacaaagtaagggctatggatgagaaggaagccagtgagcatgcgggtgtatgtggcatgcttcctgtaggccagcctgttctagatgctggaaattctaaaaggaatgggaataaatgtgtatttttaacacattttatatgccaggcatttgcatgtttgttatcaaattttttagcttagcttagcttagcttatgagacagggtcttgctctgttgcccaggctggagtgcagtggtgcgatcttggctcactgcaacctctgccttccaggttcaagcgattctcctacttcagcctcccaagtaactgggattacaggctcccagagcctgtaatggaatttcagcatgctggccaggctggtcttgaactcctgacctcaggtaatccgtccacctcggcctcccaaagtgctgagattataggcgtgagccaccgcactgggcctcaatttaaaaccgaaaaggtctctaccatccctgagagagagtttcatggaagaagatgaactggaccttttctttccctgaaatttttaaaaaaattatggaaaaccataaacacataaagataacataatgagccttaccactcagtttatgggcattcttgttacgtttctgcctccatttcctgcccccaaacccctgccttggatattttgaagtacaacctagacattatatcatttcatttataatacttaagtatgtatctctgtaagatagcggatgttttgaaatataatttttggctgagcacagtagttcacacctgtaatcccagcagtttgggaggctgaggtgggaggatcgcttgarcccaggagttcaagaccagcctgggcaacatagtgagatgctctctaaaaaaaaaaaaaaaagaaattagttaaaaaatataataggctgggcttggtggctcacacctctaatcccaacactttgggaggctgaggagggcagatcacctgaggttaggaattcgagaccagcctggccaacatggtgaaaccccgtctctactaaaaatacaaaaattagctgggcatagtggcacaygcatctgtaatcccagctactcaggaggctgaggcaggagaatggcttgaactggggaagcggaggttgcaatgagccgaratcacgccactgcactccagcctgggcaacagagtgagactctatctaaaaaaaaaaaaaagtattaatattccccmaaaagtaacagtaacctattaaaatcatcaaatatctaatcaacataaactggtttttgaagagcagtacctttgacatctcccagctcccgtctctgccctttctgggctactccattcctcaacagacctcgctctgtcacttgcattttttccctgttttgtgtcagctctttacttttagtaacaaataggttcaagtttcccctagcctaaaacaatatatctcttttcaacacaaccacagcctcatatgtcttcccaatctctttggttttgttttttatgctatccaatttcttaaaatagctctcaacatttgcagctcctgcatctttgccaccacctacagatcttcctctggtgttgcttcgcccctgtcactgggctaaaactgtcctccrggatccccagcaacccccaaattgccaaatccgatgacttactgccagcctccttggccacagtgctgcctggtgttcctaatgtaaccatcctcgaaacttctagttcctttggccctctggttccctctggcctctgaccacagggrcatcagggttctctgtttagcaccatggtcccctctggcctctgacctaggggcatcagggtcctctgtttggcaccatggtccccaccctgccctgctagaggtgctcctcaacctcagtgaggactccccctgtgaaaaggcttcactcgtgctcactgccatccttcaacatttccatgcacactttcctctaacacccccgaaacaggactcattagctaatataacaatcccctcctccacctagtttttatgctttgctcagttacacaatcaaaaatctaaaggcttatctgtgacagctctgtttccttctctttggcattttccatcaccaaatcctattggctcttcttgcatggcaagggcatggttttatgaagatctgagtgactcctttcctgtattctgcagttggctgtctttgtcgtagcagccttactgatacactcatccaaacatgttcatgtagcttcctcacatatatgcccaaagagctttgcacatgtgtgtatctgatgtaccctatattgagaagggagttagtgatcctagcaaggcataagcttgatattccagagtaggaacactttttctaaaggaaattggaagtctatatggccataaaagattaaaggagtaaggactgttctgcctgcttgtttatcagcctgtgggwtgcattacagaatgcaaggaactaagatgaaacagaaaccgataggtctttaacccrtgtgtcacttacctgtgacgtggaggtttctttccaactctgacctgcattcatcttctcttccacacagccctctcctcttctctttcgcttcatagctccctttcactctctaaggtgcagtggttcacttggaagaagtggcagtgatttgaaaataactcttgagaacggaatgcagaggaatggaaggaggctacctcacaaaccaccccacccagtctgcccttcccctgaaggcatagactttatttgattctaaaagtgtaggccgggtgctgtggctcacgcctgtaatcccagcactttgggaggctgaggcaggtggatcacttgaggtcaggagttcaagaccagcctggccaacatggcgaaaccccatctcttctaaaaatacaaaaaattagctggacatggtggcgggtgcctgtaatcccagctacttgggagactgaacacgagaattgcttgaacccgggaggcagaggttgcactgagtcaagatcgggccgctgcactccagcccaggcaaccgagccagactctgtctaaaaaacaaataaacaaaaataaaaagtatagccctggttcctcccaacacacatacacacacacacacacacacacacacacacacaccctgtagacctcctcacattcaacttaccagactgaccaggtcttagtcgaattcttctccaagatttatcttacacgtacaagaacaagatgtctaagtgcccaagattcatttatccagtaaatagttactgagccagtgtgatgagccacmcctgcctgaggctrtggggacacaacagtgggtaaagccagttcctgctctgaagttgcttatgtgccaagagggagacattgagaaagcaggcaactgggggattgggagatggtgttgggcaaatgcatgtaagaggttttggagaaaagaagcaggcagttgcgrggtctctgcgctttgatgttgtaccttggagttgctgtgcgctgaccctctgtcctgttggtagggrctcttccgagtagccccctctgcctccaaactgaagaagctgaaagcggccctggactgctgcgtggtggatgtgcaggagtactcggcagacccccacgcaattgcaggtgggcacctctcagcgctcctgtgtgccatggaggctcacagggaaggggyagaggggaggctgtgtggctacaagtccaggacactcaagtcagtggctgcccaaagcacttcagatgtgtccactcagtgcccagtttcagggctgggtgctctggccccttgaaggaaggcctccccgcatgccaagggaagacgaggtaattgtgggaagaaagaggggccaggtcccctgtcagagcctcatacccatttccataggaagctaccatttgctgttgacatggtggtcaggaggcccatccccagatggaacccacataggcagtgctggctggtgggtcttgcctctgccacatcataacagttcacaaccaatatttcattcatgcctaggagctttgaaatcttacctccgagagttgccagaacctcttatgacctttgaactctatgatgagtggatccaggcttccaagtgagtaccccttgttttggaatgtcctgtgagttacagtttatttgggagtatgtgctgaaattatagaagcatgtaacctatgatctcgcaaccccgtttcttgatctctgccatgaaggagtgcttatacatttgcccaaggaggcaggtccagggatattgatggtagcattatctgagatagcagaagcctagaagtcactaaagattcattggagaagggggttgggaagtggctaagtaaactgtggagtgtctgtaccatcgcacactctggaacaattaaaaaataggtagagttattcatgctaacataaatagataatgaaagsaagttaacaaggactcctgtgacattctattgttataaaaacgaaaacaaacacccagcacacttaaaacaatagaattttaaaaggacctatatttgtgtgtaagtgtataaaagaaagttctggaagggctcacgtaggctgacagcagtgattcctcctggccagaaaagtaggacaagtgagtgggcatagagtctttaccctcatctataatagctgaatatattttaacaataagtaataatgaacttaaagggaggtcacgtgtcatgacacgtgggcagcagcagcckctctctcccctcctgaagatgcgcccaagggagaggccgcagcccaaagccaggcgcagggctgtagcagtgtgtcgggaagagtacagctgcatggagcaggcaaagccactagcccagccctgatgcatgctctggctcccacgcatggtttttgagtcctggcttatttcctcggttatgcgtgcattaggatggcattgtatgttcttttgggcataggtaagagctgtcttaagtaaatagtattgtttggaggaatgtacttttactgagcgaatggacccccacacaacagcagggtgggagaattgctaccagcacaaagatgatggagacgagggtagagatagtctaggtgggagatgaaggagggagaagaatgttttctgagagcaggactagagcaaatagccaccttagccaggggcctgtgaaaggaaatgatttctagagatttctagtcataggatttagttgttggtgtgtttctcaacaacaccatgaggaacaggtgttgtttctcattacctgtcaggaacaacagtgaaatatgtgtctgatgctgctccttctactttttgaagaactgggcctgaaagagacccacctgacctggaagggaagccaggctcaaatgtgtagagtgagaaaagccaactccaatcaagttgcataatggtattttatttccaaagcagaatggagattatgcacttcaaaaggctggctgaatatatggttctcttttatctcattgtgaaaagggagtgctgggtttcatgacattaataattacaacgttaccatttattgagtgcttattagagacttgacnttgttttaagctcattgtgtgtttttaactcctgtaattttgacaagaaccctatgaagtggggtgtgctgtttctcctattttacatttgaggaatttgaggtattgaacaggtatgtaactacaggttacctgctggctaataagtggcagaaggggaacttgaatccaaggagtccggtttcagggcctttacacttaaccacagcactttttgcctctctaggacaagaatgtgktcctagggatgaagccaagtgagaacatatcctttgatggaaactgtcactcttattatttattggatatataagtgatcttgatgatatacagttagataaaggcaggatagcttagtgcttcaggacctatccagagatactcctgttcccacttcatttgcaaatgtgggtctccattaagaaatagaaatgatccagatgactcaaagaggtcagtgtctttgaaccagggaaaaacaagaacctgtttctaccactggatgacatgcatgtagtacctaagatcacttcgtctaaaccaagtaattttgcctagaacagtgatttccaaccctctgtgtgcatcattatgtcctgggaagctttttaaagatactaatgcgtgaacccttttttcagagacttcgattgaattgggctgggttctgtgattcaaagctcccaaggctattgggttgataacctatgaacctctgatgaagctgagtttcatcagaggccaacactaaccttaataagacattgcacttcaggccaactcagcaggacacagacagatctgccataagatgggacatccgggggccacaggaggagccagggaagcaagggctgaagttagggattaccaggacagtgcaagatagccggaaactcaaaaaggacacatccttgcaagccatttacatgatctgtttccacgctggagtcatgcagaatacaggctcagaatagcccatgggctgagctccctgactggcatctgtgtcctcctgcagccccatagccctgccacaccagagcaggtctctggctctggcacatattcacttggggcctctgaggtgtgtggaggaagcaytgttaaaatcgcacaggacaagacagaaggagaacatagaggggtaaataataacaaccaaatttttaaatactagcttgctgatatggtcagttacartggttggtatcaaatattacaatgattggttaatatgatttccgatgagactttattgattcgtgctcaaccaatgacctttcctatcaatttctcagtgtccaggagcaagacaagaagcttcaggctctatggaatgcttgtgaaaagttgcccaaggccaatcacaacaacatccggtaagtggatrcttaccaagtatagacacatggcttgggcttatgtaagcctcagagatacaactgcccgggtaaaagtcatggtaactaccatgcatagcattttrtgatgtccaaggtattattaacatgcatggtctctttttttttttttttttttgagacagagtctcactgtgtcgcccaggctggagtacagtgggatgatctcagctcactgcaagctccgcctyccaggttcacaccattctcctgcctcagcctcccgagtagctataggcacccaccaccacgcgtggtctctgtgtgtggtggcaccaccacaggtcccaagccaccctgtgagggaaggcaggaataattgttgccattttttagataaggaaatggactcaaagaagcgaaccattggctaattcagttaaaggagcaaagatgaatgcaagctatcttaagatattggggatttgtggtaaagacaggtaggtgttggtggacacctgggagaagctgacctacatgggagctgggggaggcagaagtgtccttgagcaagttcacaggaaggagagatgagggagcgtgttctccagtgctcccccattcccgagccctagctgtgttccacgtctgcctctcgcttttcttgctaccacccgagcttccacttccggcgcgctgcagatccttctccacgcctggctcctgctgcttcacactctgcttctttaccgctttgtcttgccagcacccatcccggccctgccgcctttcctcccagcttcttaggaggcagattttcagcatcagcacctactgccatctgcctggttatttctgttttcctgttaaaaatccccagaatgatgggatggcagttcctcaaacaattaaacacagaattactgtaggatccagcaattccacttctgggtatgtacctaaaagaatcgaaagcagggacttaatattttcacactcgtattcgtagcagcagtgttcatggtaggtaaaaggtgaaaagccaaatgtccgtctacagataagtggataaacaaaatgtggtatgttcatgtaacggatgccattctgattcttgtcatcacgtggatgaaccttgaggacgttatgctatgtgaaagaagccaaacacaaaaggacaaatgcagtatatgattccacttatatgaagtacctggagtggtcaaactcatagagaaacaaaatgggatggtggttgccagggctaggggatggttgccaggggctaggagacaggagattattgttttttgttttgttttgtttttcttgagacagagtctcactctatctcccaggctggagtccagtggtgcaatctcggctcactgcaacccccaccacctgggrttcgagtgattctcctgcctcagcctcctgagtagctgggactrtgtgcrtgcgccaccatgcctggctaatttttgtgtttttttttttttttagtagagacggggtttcaccatgttagccaggctggtctcaaactcctggccacaggtgatccgcccgcctcggcctcccaaagccctgagattacaggcatgagccacggcgcctggctgagattattgtttaatcgggacaaggtttagctagggaagatgaaaacattcaggaaacrgatggtggtgacaggttcataacactgtgaatgtacttaatgccaccaaattgtacgtctaaaaatggctaaagtagtaaattgtacgtatattacaaatcagatccgaagagcgggaatcgggtggtttcaacttatggcatgttgctgaccacagccctaggccgctggccagcccatgggttggcctaagctctcagcttaggtcccacatcctggtccagacctgtgtggcctcttggagggtggggcatggccaggagaggccgtgcgtggagttgtcacagtgacagctaagtgattacatggtaggacatgagtytgctggactttctaccgggctcacgaaggtgagcagaaaatcccgaatgagtcgcttcactatgatccaagcaaaatggggttaggaccacagcctattgtaactgagaggccagagaaaacatgtcttctcggggtcctggggcctcttgtcaggttctggcagatttttagtgtggtttgccagagctgttttttttgaatttgcacgtagcttcttcattgtatttgttttatttctatatagcttctttgttggctctttttataaaataactttattaagctatgattttcataccattgaacctttttaacatgtgcagtgtagtagkttttagtgtgttcatatagttttgcaactattactggtgtctcattttagaacatttcccttaccccaaaaaagaaatccccttcygataagcactccttattttccccaaccatgcccctaagcaaccactaatgtactttctggctccatagatctgcctattctaggcatttcatataagtggaatactataatatgtggcctgttgtgtctggcttctttcacgtagcataatgttttcaggagtatccatgttgcaggatgtcccaacacttcattcctttttatggatgaataatatttcattatatggacataccacatttaatttattggttcatccctttatggacatttgggtcatttccacccttcggctattattaataattatgattccatgaacattcatgtacaaatttgtgtgtggacagctttcttttgggtattatccctaggagtagaattgctggatcatatactaagtctgtgttggactttttctttattagatctttccagagcacccaactgagggtaactccaagaaacaccacccctagcatgtagatgttcctgccaatggtacttagacatactgcttatcactcctgcacacagggaacatggcaagaagtaatggggtttgtaaaaagtgaggcacttcaggtcattatatactgagtcagaaggaaagaaggagactttctggccagtgttagttgaagcagatgtcgacacctgacccagtgagatctgagcctgcctgtttttggaaagaggatgcagaatttccatttcctgacacgtgacgcatgttcattacattgcaggtgcacgagtctcctagtcagtgagatatgtgacatgagagaagcttctgtccagtccccgggggacatggctggtgttgagcyttggttaaacctggcccttctaattttcttttagatacttgataaaatttttatccaagctgtcagaatatcaagatgtaaacaagatgactcccagtaatatggcaattgttttaggacccaacctcctatggccacargcagaagggtaagtacagggcggagaagtaatgtgggtgatcaggtgggactgcagggcctgagcagggtgggcaggacagctggggcctagctgagcaccagcctcatgtattttccaaaccctatttctttgttggcctgctcctcttttaggctgaggaggaggcacagaattctgcagatctttctttttgttgatggtcccagagctacaggtctgaagtcagggtcttctctgagctaattaagtcagcattgggatgaggggaaaggagggcgtaggacatggtggcacaggtcaggcaagctcttagactctgtcataagaggacacatcccagcctcaggattcggagggatagarggctgtctccagagatagcagtgttggaaagaggatgagaatcacagrgacgggagggaggagaatcacacctcacgttgaaagtggctttgtagggattgttcatgtgcctcgggtttatctccattctgcagatggaaaaagagaagttcagaaaggtgaagattccctcccaagagaaagtctgctctcaaacctctgtctgtggggttccagtccagggccccttcctgggctctgcagccagaggaccatgggcctcaaagcttgcctcagctgctaactccaccctgtttgcctctgctctctgcttacaggaacattacagagatgatgaccacagtgtcgctgcaaattgttgggatcattgaacctatcatccagcatgcagactggttcttccctgggggtaggtgacagcacctaggtgtgggggcaagaggcagggaacaggagtatcactgcgagttctgagcctttgaagccaagtaccactgcccacaggcttttttttttgattccccyataaacacacacacacacacacacamgcatgcagacatgcacaaaggcacacacgtatcagggtggagtcatggcagcttcctgttctgtaatctctatattttttgagatggagttttgctcttgttgcccaggctggattgcaatggtccgatccggctcatcgcatcctctgcctcctaggttcaagcaattctcctgcctcacccccwctacccactgagtagctgggattacaggcatgcaccaccacgcccgactaattttgtatttttagtagagacggggtttctccatgtcgctcaggctggtcttgaactcctgacctcaggtgatctgcctgcctcatcctcccaaagtgctgggattacaggcgtcagccactgtgcccggcctgtaatctctatttcaagggacactctggcctgaaggtgtccactgtctgtactaaccatgtccrtggattttactggtctaatatccataccatagtttcttcaaatctgcaaatcttagaatgcttgtgcaggaaggaaagatcctctgccccaaatccttcactttgtagatgcagagggggagacaggttcctgagatggatggggacttttattcaggacttgcagatcacctggatgccttacagacccaccttttgctaccctaggttgtgccctttgagttgtccctcagcatgtgaaggtggggctcaatctcaaaggcaatgagattcttttttttaatgcctgcttcaaaattaggctctgaagataacttcctaagagggagtttcagagatgttctgagccacagaagcctcactccataagtagatgactctcaatggtgacagctttgaagagatagcagttgttacactaaattcggcatctgcttaaaaacataataattggtactgtaccgtatgtttggtagacattaagggaatgctttttgctgtgctgcaacagctgttaaggcatgtgaggataggttagtaattctatgctctgcccattagaggtaatcaattaaatcaattaatgctgttctaacattgaagaagtttgattgtctttcttttgcttcatgtgttttaaggtcgaactgctgactccctaagagttgcgttgataacagagttgggtgggtgtgggaaatcaagataaagaaataaaggaggtaggagtcaagacagtaatcctataggttctgcggctgagctaattcattaccactgcacacagacagaattgtgcagagctaatttattctcattgactgggaaaggatgggatgagtacttctgtatatctctttgacagccaaaaaacaactttaatgaaatctatatttctaatatcttgaatttattytctatggttttccagaaaggcagtgtcatcatctataaataktaatattgcctcttattttattttcttgactaattccattggctagtgtttctcaaatggtgttaagtaatggtagtggtagtgagcattgccatttctcctgattagtttaggacagctgtcggctttcagtcttaagcatgaggttttagaaagatgatttcatatatttcagaaagtatccgttcctgtttttacaaactttttttttttttcacaaattgacattgctttattaratgcctatataggtgatcacatgtgtccccctttttggcctgttaatgtgatgcattatattaataaggtgaaccatgggatgaaattttctagggatgacatacgagggagtgggtgtctggactcattcctcccctgcccaggaagggtgtggcagaccaagagttcacatgtaccaattctttcttcccyrcagagatagagttcaacattactggcaattatgggagtccagtacacrtgaaccataatgccaactacagctcaatgccctccccagacatggaccctgctgaccggcgccagcccgagcaggcccgccggcccctcagygtcgccacggataatatgatgctggagttttacaaaaaggatgggtatgaactggtgtctctttctcagcactggggattaggggaggtggtgggggtggatgggtgacgcataagaaaaatacaattacgggaaggcygcactgactctyagcagtttaggtgactcgtagcaattaaactgtatctrctgtgtctgggatgagtttctttggcttgccgccctttagaccagaggtcagtgtagccttcttagctgacacagttgtgatcagtattaattagttctcatcaaaagaaagaaaaagtagtcactgagtgcaattaaaaaaaatacatacgcactttatttggaatcaaaatgtatacaagtagatcaattccagaatttgtagtggctttactttgattatgaatgggctcattgcattcttcagaagcatcctggcacaaacaatacctttaatgtacagtttaacgttcccagtttcagcctaaaacttgaaacagcctgagcgtaaaatccttctaggtttttaagatgttttcctatcttttattattaacatccataactacttcaatgcagttattaagaggcttgtaagtacattcaatttagtttgctcagcaacaaccctgtccacactcatgttaaattagtttatataatattgaactacataatgattcccatagcaagtaagatgggcataaacaggtttcgtaacaagcacagctgactcacggtgagcaccggctcagccatggcaaccagaggacgtggactaatgagcgtgttcagcaagctgcaggcatccacgaatacctcttacaggaggggatcgtcttggttggtcaggcaagtcagttcagtgaactttggttagaaattaaaaattactactgtaaaataaaatgtagcaagtgctcctttaggatagatgagagcataaagcattgaatgggagtatcggaaatgcagacaacaggaagtaacctagctagaaccttcccctttccggacagaccactgggcagccagaaagatatgcttgaaaaggcccatggcctaaagcggtgcaggagggaaggttgaaaatccaagaactgttagaggtgtgtgaatcttacttttcaccccacttctttctgaatgggagttggtattggagaactaaagttggcagaggagacctaggcttgtttcctgggatgacggtcaagcyttcacaatggccagtatctcttctttgttacttcacctatcagagacaatttgtatgtggcagatgggagttgtttgtgtgcrctatgctggtgtttattgttctccacttagtggagaaagaaaaaaaaaggaaattcttagaaattcaaatgagtatgaaaaaatgtctttcttttttgttttgttttgttttaagacagtctcagctgggcgcggtggctcacgcctataatcccaacactgggaggctgaggtgggtggatcacaaggtcaggtgttcgagaccagcctgaccaacatggtgaaaccccatctctactaaaaatacaaaaaccagccgggagtggtggcacgcacttgtaatcccagctactcaggaggctgaggcaggagaatcacttgaacctgggaggtggaggttgcagtgagstgagatcgtgccattgcactccagcctgggcgacagagcaagactccatctcaaagaaaaaaaaagaaagagagtctcgctctgtcacccgggctggagtgtggtggtgcaatcttggctcactgcaacctctgcatcccggtttcaagtaataattctcaggcctcagcctcccgagtagctgggattacaggcaggagccaccatgcctggctaatttttgtatttttagtagagatggggttttaccatgttggccaggctggtctcgaactcctgaccttaagtgttcctcccgccttggcctcccaaagtactgggattacargtgtgagccactgtgcctggcctcagaaaaaatttctttaatctataaaaaagaacatacttagaatctgcgagtcagagacagagaaaactagacagtgcattggaacttgtttttaaatcttattaacgcagttcctatgtgaaatctcygtaagctgaagggatgctcctgagggtaaatyctggtcctggttgggtgatacagcactcctgatattccttcccaggtgtttctaccccaaagtgtgcccctccatccctcctccatcctctctgccagatctggtttgattccagtgcctcctgggcgcactccaaatggcctctgagagagagttaccactgcagatgcattggagtactcagagttcactggcccactatctgcaggcagatgcagaagcttgagcaatatcttgagcagataccttatctctgataaagctcycctgcttaagaattttctaaatgatatgtccactctgtatactattcttatttraagttgaaactgccaccatctactttaagagtataggaaatttattacataatgtattgttgtacataaaataaatgtttcaaaatgtgtattaaatgttaaattcaggccgggcgyggtggctcacacctgtaatcccagcactttgggaggccaaggcaggtggatcacctgagcttgggagttcgagaccagcctgaccaacaggcagaaaccccgtctctactaaaaatacaaaattagcccggtatgatggcgcatgcctgtaatcccagctactcggaaggctgaggcaggaaaattgcttgaacctgggaggtggaggttgtggtgagycaagatcacgccatgcatggcagcctgggcaacaagagcaaaactctgtctccaaaaaaaaaaagttaaattcaatgaaggtcttaccggtttagggtggctctccctgagttgtctgaggtagagcatctgtgcgtacgttttaaggaagtgtagtgaattgtagaagatcagttcttacctgaccttaaagagtgggtgtttttggagagaggagagaaatttgcatctcttgagtccctatgttatcttagtaacattaggscagttctctatattggccccatttctgatcttttgaaatctatgagatacattttaaagtcttcacactgctcattgaaaccctgacaaattaaagctcatgttattgaaggtttttggccaagttaaaaaaaaatatatatatatatgaattatatatcaataaagcagatacttatttaaaaagaagaaaattgaggggcagaaaaactgggtaaaattgcaaagaaatggtaagttaccgatttgtgtcagtgacactttcctaggctgatggctgttatgtcctagatgtcatacaaagcttcttacttccctcgcgactctgggctttggtcctgatgcctttctgatttgaaatgatgcaggaagctgggtttctttagcagggcttggtgaccagttcaggagcttacatatacatttttcatcattgtggtaggtaaaataatgcccatccaccaaagaaaaatagatctaaagacctggaaactatccatatttccttattttggaaaaaggtctttgaatatgtgattaaaataaggatctcgaaataaggagattgattattttggattatcaaggtgggctctacatgacatcatgtgcatccttattaagagggaggcagagagagattttactacacacacagaggaaatgtgaagatggaacagagagaaatttgaagagatggccacaagccagagattgccaacagccaccagaagctagaagagagagcaaagccttgctccctccttgatttccacctggtaatactgattctaatttatttagaaaatcaatttctgggtcaggcgcggtggctcatgcctgtaagcccagcactttgggtggccgagttgggtggatcacctgaggccgagagttcaagaccagcctgaacaacatggagaaaccctgtctctactaaaaatacaaaattggccaggcatcgtggcgcatgcctgtaatcccagctacttgggaggctgaggcaggagaatcgcttgaacccagggagrmggaggttgcagtgagccgagatagtgccattgcactccagcctgggcaacaggagtgaaacaccatctcaaaaaaaraaaaaaaaaaaaaaaagcaatttctgttgttcaccaaccttgtggttggtactcatgacrgcagccataggaagccaatacaatcatccactgcagctccacaccaagagctttgataaagatggcagcagatgctttgcttgtcctcccagggagtgttggaatctgattgctttcccttcgagtctgagttgctctagtgagttacttgacctagtaggatgtgggagaggtgatgttctgggactgctgaggccaggtcagaagaagccttgtagattcttcctgggtctctggagacagtcactcttggagcccagtaccatcctacatggaaatccaagcagctccttggagagaaatggaagtccccagccctcaagcccagctgagcactgtcctgacagccagcacagctccaagctctgagaaggagtcattctggagtcttcaacccaagtcagaccacctctgccaatgctgtgtgtgcagacaggccagccttgcatcaatgctgtgtgtgcagacaggccrgccttgcaycaatgctgtgtgtgcagacaggctggctttgcaccaatgctgtgtgtgtagacaggtcggccttgcaccagtgccgtgtgagcagacaggccggccatgcaccagtgccgtgtgtgcagacaggccggccttgcgaagccctgccagaactctagattggtgacccagataaccatgctaagttttagggtagtttgttacataacaaagagccagaacaagcttaaaaaaaaaaatccttcaacctgtcccaaatctacccatctgatttaaatggcctggcctgggataagtatgwgattctaatgtgctggggttgggaactactgaataattttgccactctgaatgaagaatttggcaatgctacattttttttaatttatcaaaactttcctactttagccattgagtattggtgtgatatatagggtgtcctaactccaccaacactctgagcaacaaagtattaaataaatcacactattgttttctgtactttttaagctctttcttagaaagttttgggtgcagattatgtttttagtgtcttttttgtttgggttgttttactgttttatagaatagtgaaatttgtgtgttaggtcattagtcctaaataataaatgaaagtaaatctacagtcccttctatttctctgacagtgccagacttcctggtcaaatcaatttttttttctactgccttcagaagagtttgccaaagtgtctgcactcttgctggttggtcagggagcacccatggagccagcattgggctttggactccaagcatttgtcagatgcctccactggctacatccccgactgagcctggacaagctgggccaggactgttgaaggacctgtggagaagcccagaggcaagaatagaagcgacaggctgggcgcagtggctcacacctgtaatccctgcacttcgggaggccaaggtgggcggwtcacttgaggtcaggagttctagaccagtctggccaacatggtgaaacctcatctctactaaaaataccaaagaaatgagctgggcgtggtggcagacgcctataatcccagttactcgggaggctgaggcaggagaattgcttgaatccaggaggcagaggaggttgcagtgagccaagatcgcaccactgcagtccagcctgggcgacagagtgagactctgtctcaaaaaaaacagaatagaagcgacatgggtaatgtgacctccttcctagcatcacgtccctcccttccagatagctatcagataactgccatcttccccttctctcctctctgtctccacgacctgcaagatgcccatctgagacttcagtagaccactgcccactccctacctctgtgtttcctcagtaccttcctccctactgcctcttttctttcttctggctctggcccctgctccctgcacttgcctgctggcttgtccatctgttctgttgcccctgcttagttctagcctctcgtagcctgaaacccacggatgtcaaggccctgacagcatctatgaagctgccccacagaccccatcaaaacgtccttggatcccgatgggccggcgatctgccacggagatccagctacctcaggccgtgattctcagaagaccaacatacagctcctctttgcaggcctgaaaccygacgcacctactgycattacacttgctccaccgtggtctgatcctcaggggttctctaccagagccaggtgacagcaacccgaatggtctatgggatatttacatcagggccagcagcctcccttgagctctgtttagtgggtgacccattctcaacctgtgcttgagagctgcactgcaaagggcttgtcccacccctgtggactttaatctagatgttcagtaatttggaaaaggcacacttgattgagagggttctagaawaattcgaactgtgccctatggtataccagtttccactggtagttggttatattatgaatggggaggagggtggactctgatgtctaataagttcctgaagcacatgatcaacacattgaaaccagtttctttagtgtatgacttcttagagtctttaacatgctgttacaaggcacagacctccacagggggctgtagcatgtatcatttcccaaatttagtatatcacaacacctgagataaattgaaccagtgccccaagggacttgtttttgtaattgcagatgtggatgtcctctgtagatcctgtggtggagggttgaacagcacattaaaatccctgaggccaggtgcagtgactcacacctgtaatcccagcactatgggaggctgaggcaggaggactgcttgaggccaggagctcaagaccaatctgagcaacmcagtgagacatcatctatacaaacaatttttaaaaattagccaggcatggtggcacacacctatagtcccagcttagtcagaaggctgagacgggtgaaccccttgagcctgggaggtggaggctgtagagagctgtgatagtgtcactgcactccagcatggatgacatagtgacacgctgtctcaaaaaaaaaaaaaaaaatccttgaaagagattatgtcatggataagtgatgcagtaattttacttcagagcttgaacctatgataagacaaacttacctagaaagtcttctgcgtatggatggaaaatgtgactcctattttggtttagggttgtctacatggagagggatgttttggtccaggccccttatcagcctcctcccctggacttagacattgttggatgctgggaccaagtctgaaatgttgtcagaggacttggcctttatgtgtactggagaggttaaggtgcttcgtcgctacttactgaagagaggagttacttccagaaaagctggaaaataccgaattcaggcctcactgggtgtgtgtaggccaggctaagtcttaggagctttgggtccccttttcactcacctttgctgtccgggacatcatctgctgaccctgtggctccctgccacagttcatcttacagtccctgaatgtgcacgcctacagtgggtgtttgggaagcttctgtggatatttgggaagctaccaggtttccctgccccctctttcttggctggcctttgccaaatgtaactgatctctagaacaaaaaccaaaaccttccaaatctctrtagacttgaacacttcacagccatgtattggctgacacctcccctggctaggattcttcctgaccaggagtcaaaaacagcactgcagatgtctgatcttcagaggtccgttctgctaaccccagacaactcagctagaatggtccacagcaaaattctgcccggtgataagtgtattctacctatagatacctattcttcttggagctgggatcttccaaattttatattttggcttttttttctccttttttctccccctcttcttccttctcctcctccttcccctgccccaaccccagcacccttcttcctcattttttttttttgttttgctgggcaggtctttgtttctctttaatttttgtaaggtctccatccagggtgtgtcaatgcctggacactggccagggttaaacttcggggtgtgaatcagaagatcctgatccacaactctttttgctttttttttttttttttttttttcctgagatacagtcttgctctgttgcccaggctggtctcaaactcctgggctcaatgatcctcccacctcagcctcccaaatagcatggcccataacttttagtgggcagatacacaatagaatattgtacactgtggttgcaatgtctggaactgaatttgtccacgctcccctcctgcctcaattcctcaacaaagacaggcttattctgaaccctgccatcatggagtgcccgggaaggcatttttctcacatggtttccttgcttgccccatcacaataccagtgaccttctcacttcgagtaaaaggaatgacccattttctaagttcaggrggcttagaagtgagcagacaacatcttctactggtttacccttagctgctctaggtgatcgctgagcacctcctcaccaacacatcacttcattgcttccctcttgaaccctgagccgtcgttccactggtcctgggcctaatcctctccctgtatggtctaccaggttgcagactttaaaagaagcatgccatttcatctccagcatcaacgagccatttatagttcttctctttctacttctccctgcttacacggtgtgaaagtcataaccctataaatagccctgcatgcagagtcttgagctttggaatcaggctccctctgagttcaaatcctggttactgaactctgaatgcctcagtttcttcatatgcaaaatggggaaatcatggtaagcaccracttgaatcattctgagcattgaacgaaatattgcttacaaagtgtttagagcaaagctcagcacatggtaaatgttagctgttcttagtacaggaaccagatttttgagtgacatcctcatgtttttaagggggcaacgtggcggggcccactttcccactgrtgaggcgtcccgatccagccctttccytgccacctcgggtgcttgaatgtttttatctgtctccaccttaccacgagcaattgagctaattctacaagcaagagatatacaaacaccaagggcttcgtgacaaagcacgaaatatcctaacagccaaggacagctgacggttgcaggaggctccccaggacgtggaaaaccctgtgtaagcaggaagtgctgtgaccattccaggctgagcctcctgcgccctagtgtattttgttttccaaagaacctttcagacaagatgacccttctgactcctgcctcctttactgccccaatgacctgggttgggcagtaagacttagaagggtttgcaggcatcccctctttatttgtttgttccttaagcttggaatcatctaagtagcattttagcaagcccctattctgaaacccaaattgggtcatccaactcagcagagccccgcgagactaagaaacctagggaaatgggactgataataaactccagtcctcatttttttccagtccccattttttgttccctgttctatttctttttctttttcttttatttcttttctttttttttttttttgatacagagtctcacactgtcgcccaggttggagtgcagtggcgccatctcagctcactgcaagctccgcctcccgggttcacgccattctcctgcctcagcctcctgagtagctggcattacgggcacccgccaccacgcccggctaattgtttgtatttttagtagagatggggtttcacagtgttagccaggatggtctcgatctcctgacttcatgatccgcccaccttggcttcccaaagtgttgggattataggtgtgagccactgcacctggcctccctgtctatttctatcagagaactcaccccaaaatcttttgatgtttagggtcactgttaggaagggaagaaatctgatgagaaacctgataaacccaggtgacatgggccagatggggtcttcctagcatctctatcatgctgtgcctgatgtcagcagtagagtatccttttcccccctttatcaacatattttagacctgcgttcattctctttctttctctgaggagattttcaaaaacaagtcatatgygcttggcacctataagcacaaagcattctcattgacactacatcttactgatttcttagtaagagctaagggctttatggccacagtttcattggctccttacaacaaatcgaaggaagagaagcatattattccattttacaaaggatgattcgaggatratcagatagaactcctccatattatagagttagtcattggaaaatctaggattcatacccaaattctctgctttcaaagccctgctgtcctgagctggagaggctgtggagtcaccacgttatacccaaaaaacacaagccagatactaggcctttatattccgtccatyaaggtgttgtctgatgctctgcatctccagcttgtccacatcataaaacaccattggcttagctagctagaccctactacaacccactgtatgaccgctcagcttctgccaccaggkcatggtgcaaggacatgctaaatacatctcagcactcaataattgataaactatcttcatggaaatgccggaaacaggaagggaggtattagctccattctatgggtgaagagagagctctactgagtcagcaaatggttaactgggactagaggcctgggtcgttctagaacctattccatgataccatctcatgaaaaatacccacgtttccattatgataaatcctatgcaaatataagatgctggcaggcagggaagattgttcttcagtgggtctaccttgccaaaatgaggrcttatcacctgactcccatcctgtgcatctcaatgatgagcagtgtcaattctggattccctgccccttgtcttcttactctgagagagagcagtgktccagcctgggtaacatggygaaactcatctctaaaaaaattatgaaaattagccagatgtggtggcatgtgcctgtattccaagctactcaggaggctgagatgagaagatcacttgaacccgagaagttggggctgcagtgagccatgattatgtcactgcagtccagcctgggcgacagagcaagaccctgtctcaaaaaaaaaaaaaaaagaaaagaaaaagaaaaagaagagaagagaaaagaaaaaagaagcagtggagagaatcacctcaggttccactccccagattctgtaggctccctacctcctgcttagtgatttctaagccctttgcttcacatagattcttgctggcctctgacttcttgctttcaccttgattcaactataaagggatctaaaagccaaattgttttcagttttcagcagaagcctgggaaatctttgccatctagattgtccttaggtatccatgcagggatgtctgctggagtcagatatgttttattaattccacttctttattgctcctttcttaagaaacagcagcagtgccttgattccagctactgtttctttatgcaataaaacaatgaacagaagcttgtgaactgctgatataaccttctagttggatccccgatctgtgaatagattccccttcttggcagcatactgagcaattttattatttctgtcttcaggttgagttttatctagacatttgaacatttacatatrccatcttgctttggaaggtaaatgcacttttaggcttccaacagcattgctgctgccgttgtgattgatttactgtgtaaagatttatattactgtttgaaaatgtcagtgaacatttgatgtgaattcacagtggaacatgtgatgctccctcttatgagaaagtcatttcagctgggaaagtcgtgattgcatatggcactgtagcctctttacaagaggagaagtagcacgttgaacccatatttctcagttgccgaagtttgccagtgttatttagcaagtctcgcccagtacctaccccatgcccaagctgacamcttcccttggtaaaccagaagatcaccaaggaggctggtgtctgagattcctgatgctagaaggtactgttggggaaatagaaggcatcccccaccagctttggcccagaccttctcaccaggtgggaaagcctttttcaagtagaagagaaaggggcaaggaagagaaggtggggtaggacttagatttttaggactccttgtgctggtcaccatgtgaaacatctcacatgcccgaaatcctcaccaaccattgcaactaagtggtatcagttccgttccctaagaggaatgttaagctctttgttcttttcatcctgatacattctgaagcctgcagaccacagttcgatgatcttcggcagcccgctgtaaataccaggggatgtaaccagactgtgtcccagagtttcaagtggcctccaaaagcatttctgggtatcgtataggaagtgtttgtttattggtagaaggttctcagaccccagatgactttggaaactattgggtccaggaaagagacatccctcccctttccctccatccctggtgcctccttgaagccatccagcggagatgagaaataccagcaatcgtactagacatgagaaggcctctggtgatggaaggaaggggatcaggaagccctcccatgccagtgtgtgcttggtttcagcatcactccccatatttccttaaaacagctaaatcccaccatcccaccttctgcaaccaaatctccatacttgaactttttctgttattaaatcttgctgtacctctacaaggtaaatatgacctttctaggtgagcaggatttcatggtgtaatagttttgtgcttctgactagtgtaggtgaccatttggcagggaggaggtgaaagtgagcacatcatagtcctcatacacctatctctctgtgcagatacgtgatagagacaaatgctggttgggagtatatgttttctccctgaatgaatgaatgtttctcccttaatgctagaaatgtgagcccttaccttagtcaatgagtcaatgaaaccttggctgagatgacagcagcagtacctcctagaccagaggaaagggaactaaccacctgctagtctatgtaacttagaagwcagtggataaggccagrcgtggtggctcacacctgtaatcccagcactttgggaggctgaggcgaatggatcacctgaggtcaggagtttgagaccagcctggccaagatggttaaaccctgtctctactaaaaatacaaaaattagctgggtgtggtggcrggtgcctgtaatcccagctactygggaggctgaggcaggagaattgcttgaacccaggaggcagaggttgcagtgagtggagatcgcaccattgcactccagcctgggtgacaagagcgaaactctgtctcaaataaataaataaatatttttttttttttgagacggagtctcactctgtcacccaggctggagtgcaccgtcgcagtctcggctcactgcaagctccacctcctgggttcatgccattctcctgcctcagcctcccgaatagctgggactacaggtgcctgccaccactcccggctaattttttgtatttttagtagagatggggtttcaccatkttagccaggatggtctcaatctcctgacctcatgatccaccagcctcggcctcccaaagtgctgggattacagatgtgagccatgrcgcctggtcataaataagtaaaatgtttttttaaaaaaagaagtgagcagatgactacttttaccagtttctttcttccttctgcctctttcttccccatgccacaccaatatcaactcttcagctgctctctttacctgtgtgcatggtagggtatgacttrcacttacacaaataggagagtcactttagagagaccaactaaattgtaataattttatagcacaataaaaatcccaccccaagaccctggaccatggagagagaccccttacagaaagacaacctttatgtccaaaggaaggcctagattttttgaaactaatatctgtatgtttctgtccctgcagccttaggaaaatccaaaggtatggtatcctctggtagctatgaggccatgctcagtctcttcaactgagccacctatgcatcgtagtgagttccaccagagggtgaatgcgccgcgtctggttgcttggccgacttatttgaagctgtgtgcccatcattaaaatagaatcagagcccagagggaccataggcacaagcagccccttccctgctgtgtagacaagtgggagtggcctgcagaggtgtgccttggccagggtcccagcagtggtggagctggggctagactccaagttacaaaaagaaggattcatatttagatgtctcctgctgtcagttccacgctccccccttcgctgcccctcccacctcgtcttgcacttgggaggagtgagtgtccctgcccccccagttaggccacacaccgctgtgaggaaggctggcagtttacacccagggagcttgccgggccatcatcctgagctggctttggcagagggttgaagcacagcttgtggccgccagcgctgccgactgtgccctgctccttgcctcagtgagggggccgctcttgccaggactgggctgcccagggctgtgtcttggccgccgggagcagccagggtgctgggagcacagcccccaatgcatcgcttcccgggcccccggggtgctaaagctgcgctgctcttctcccaacgcggacctgcttgaatgtgggggagggagcctgtctcctgtcatctgttacgcgtgggtaagcggtgtctttgtgtccctcgccagcatgggtgtgagggtcatggacacaaactgggtggctcgaagaggctcctcggccggtcggaaagtgtcctgcgccccgccctccatgcagcctcccgccccgcccgccgagctggctgcgcccytgccttcgccgctgccggagcagcccctggacagccccgcggcccccgcgctctctccatccggcctgggcctccagcctgggcccgagcgcaccaggtaagcgcgggccactgccgtccgggcgggctggtgtgcggtgcagsgggtgtctgggttggccgcactggaggcctcttggatttcgtcgtttcccatgcccccgcccccatttctaagcattcatatttggcttctgcgtcgcgctggcaccaagtcagtcatccacagctgcctggattatcacacgaagtccagtcttccccagcataacatcgcaagcaagcagaaggtggcagcttgcgaaggcagggtgaagagtcttaggttccccaactctgttttccccttcctctgtctttgtcgttacagtggccccccatatccgtgggagatacatgccaagacccccagcgcatatctgaaacagctgatagtcccaagccctatatatactgttattttttcttatacacacatacctgtgataaagttttaatttataaattaggcacagtaggacataagcaataactggtaataaaatagaagaattataagcatatgctgtaataaaattatgtgaatgtggtgtctctcaattttttttttttttcgagatggagtctcggttggtcgcccaggctggagtgcagaggcgcgatctcgactcactgcaacctccgccttacaggctcaagcgattctcctgcctcagcctcccaagtagctgggattacaggcatgtgccaccatgcttggctaattttkgtatttttagtagagatggggtttcactatgctggccaggctggtctcaaactcctgactttaagtgatccacccgcctcggcctcccaaactgctgggattacaggcctgagccaccatgcctagcctgaaaatattttattgaactgtacgcacctatttggaccacagttgaccacaggtaactgaaactacagaaagtaaaaccacggataagggggactactgtatcctattttgaagtttacaatttctgtgtttctcyttctctttatagtcatagcagccacttttttttttcttttgatgccgctaaaatgggtgcaagtcagggaatgaatggaggtggcggttgtactgggcctgatgacctttgcagcttgccacatggttgaattgccattattttaggggaaggaaaaagacaggaattcattccatgggtagcttgatgaatattaactgataactttctctttttaaagataaaaagatggcygggcacggtggctcacgcctgtaatcccagcactttgggaggccgaggcgggtggatcacgaggtcaggagatcgagaccatcctggctaacacggtgaaaccccacctctactaaaaatacaaaaaattagctgggcgtggtggcgggcgcctgtagtcccagctactggggaggctgaggcaggagaatggcgtgaacccaggaggcggagcttgcagtgagcccggatcgcgccactgcactccagcctgggtgacagcgtgactccgtctcaaaaaaaaaaaaaaaaaaaaaagataaaaagacatgattgctgcccttaaaaagttcacgttccagtgagcaaacaggccctgacaaataatgacagcacttggttatgcatacccagggtggcaggggaggagacagtacctggcccttccttgaaaggggcatgatcaggggaggcagattctggatgtgagawttgcaccatgaaacagctttgctgtttgtttctatcttttctcaaacagcaatttagaacaccagaaaagcaatatgaaatcacatgccaccgtgtctcctgttagaagacatggcattcctccatgaccactgccagaaaagttttggagactttgggaagctgaatcttctaacccaaatctttctccaaacacacatgcatacacatggacactcatcctcacacaccatcaccaccagcacacaaacacacacccacacccacaccaaccccctacatgagaggcttccaggcttttttgttttattttgtttaatgagtaaaaagtattttcacggccgggcacggtggctcacacctgtaatcccagcactttgggaggctgaggcgggcggatcacctgaggtcaggagctcgtgaccagcctggccaacatggtgaaaccccatctctactaaaaatacaaaaattagctgggtgcagtggtatatgtctatagtcccagctactyaggaggctgaggcaggagaatcgcttgaacccaggaggcrgaggttgcagtgagccgagatggtgccactgcactccaacctgggtgacagagygagactctgtgtcaaaaaaaaaaaaaaaaaaaagtattttcactgtaaaaccaggaaatgacaaagggacagggggwtagatagtcttagagcataggagggggcacctgaccctgggcatgctgggttgctgttgatgacttcaactcagaggatgctcggtcctggctgtgtaattgctaggccacagatggacctgagagatgcagatgcgggcacagtgagttcactggagaagcagagtctgagagtggtgggccaggtgaggccgaccaggaggaaacggacccacrggcgggagatgggctgggactgcttcctttttggacactcctcagcttcatcctagtttcccatcttagaaaggggactcagtgccatatggtatttggcatataaatgatatttctaaaaagtgctccttgaagatggattcccccaggctctgaaggcattccaggaacattctcggtgggtgaccttgcagagttacttgtgggcaggcaatggcaccctctggtttygattattttaaagccaactcacattgctctatagccaaatgtctttcccctttgcccgggctgaccggtttagtaacttttctttggatgttagtgttttgtgttttacaccactttttgttctctccccgcatgggtttctcccagtacaaacaggtgttccattgtttttgtttgtgttgtttgtttctgtttcctggatgtttgcagcccagatgatgttccctcgagtggccggattctcgttctggctccccctcccctgatggcaggcccttccttgcctctgactggttcccaccttcccactccctaccccaggccccgccttcagttctttccctggctctgtccagccaggctctgcctccacatccygcccaactgcttagcatgaatgctaaccccaaaattctccttcctgcttcttggcaccaaggtcatgggctgagtcatgcatcttcagagctaacttgtcctcaaacgtgccttaaacatgccttgttcacgtagcgcccctagtagccgccctacgccccacctctccccactgggtcagctgcacctatgctggagaaagaggacaaggctaagtgggtaaatacttgtttctgtgctggaggaagtgtgtccgggccgggcgtggtagctcacgcctgcaatcccagcactttgggtggccgaggggggtggatcctgaggtcaggagatcgaggccatcctggccaacatggtgaaacccygtctgtactataaatacaaaaattagctgggtgtggtggcacatgcctttaatcctagctacttgggaggctgaggaaggagaatcgcttgaacctgggaggcagagatgacagtgagctgagatcatggcactatactccagctgggcaacagagcaagactccatctcaaaaaaaaaaaaaaaaaaaaaaaaaaagtgtgtttsgtggcagggaacagaaggaagagctcattcctagattccttggatagatgtgtgtccaaaggaaggaagaagagtctacccacccacaagaagcaattttttagtttgctgattatgagatgtttttgattggttgactggccttcctcttgatagtggcagagatagatggaagggtaggtagatatttggcattgatgcccgggtacctggtaacctgcagcctgaggtccttgtccagcctgagtgaggcaagggttttctgtttctgtttttcatgaacagaatagagaaaggaattactgctcttttggttcctctgaataaaatggtttttgccccttggggaactaggtatagtgtgtaagactcatcccaagtgggagagaatgtgcctccacattgaatgtgatcttccttttatttctttgcatgaggaaaatgacctgtgctttgacgctatgggcttccccggcccagctccctgctcccagtctttctcacctcagtggacgagagtgctctattcctattggaattttctccaaattaacacctggagtttctagatcagtttaggaaagaaataggctgtgcctgccttttttttttcttttcttttttctttttttttttttttttgacagggtctccctctgttgcccaggctggagtgcagtggcacgatctcagctcactgcaayctccatctcccgggttcaagccatcctcctgcctcagcctcccgagtggctgggattacaggcacrtgtcaccacgcccrgctaatttttgcatttttagtggagacagggtttcgccatgttggccaggctggtctcaaactcctgacctcaggtgacctgcctgcctcggcctcccaaagtgctggattacaggcatgagccaccatgcccggcccaggttgtgcctgctcttgtgggatagaaacagccattgcagaggatttgggttcccagactcttcatgccccacctgtgggcatcagaatccaggtaggttctagcacggatgacagatggctcccaactgtggggcatctcccctgattcactaaaggccacctggagaattttcttggaaaggattgagaacactgtgggggaagtgtggagatcaattagtaatatctaccatcagcgtatcrggatgacaaatccctggtttgtggtgtagagtgaggtgtcttctaatacgtgcttcatcctcagaagaaggctgaggaacagccttgcagtaacgatgaatcctctttaggaaacctggtgacctagggtgcctcattgtcaattccagaggtcagaggccagagccctcactgccatcgaccttcacctctcttgaagcctgggactgggactcaaactggcccacatttaagggcrtggcctggatttctgtccaccctagcytctgctggaatgggtattgagtttgaggatgagtcctagaatccctcctgcctggggggtggctggaggctcagggcaaacagctggagagctgggccacaagcttggcagcaggagtccgtgtcatcagcactcgttgggcacagtggccctgagaagtcctcttggctacagtaggaaaagcactttggtgttcyagtttgagaatgttctagaattcctgggttgatggcaggatacggtagaggtgctcaggcccctgccctcacattgctcacggtctccttgaagagaggagggcagaggcatgaaaagggcattggcagtgagtgccaagtgccacagagatgggggcagaacccaggccatcagagctccaggaagggcagtcaccccaaggggcacctgcgaaggttttaggaaggggccaagacagaccagagctgggacagacttgcacggggcccagaaggacacacagggtggccatcggcaaggctggtgctgccgctcactgagttcagggcttttcttttgtctcatgtgctttcgtttcagcacaacaaaaagcaaggaactttctccaggctctgcacagaaaggaagtccaggctccagccagggcacagcctgtgcagggactcaaccaggggctcaacctggagctcagccgggcgccagccccagccccagccagccgcctgcagaccagagtcctcacaccctccggaaaggtatggccctgcttcccttctccttggtctcaggccggaggtggctgtgacattccctgaaggctcgttttcctctatgaacttggatattgagaaactgtgtggtttagtgactaattcccatctggacattagagctttggaagttaaaagggatcctttctctattattcctcagtttacttatttgacaggtgggctcattaggggcrtatagaggccagtgcttcccatacaccaaatgatgycaccagggcaaaattcattgtccacaatgatgtgtgttttccagagacctgccgggccctacctctgtcatttgaaaagctgtatagggtcatctacaggagtctccttccccgcagggcagcctggcacagctgcctacccctagatcactcgtacagggtgacaggagggagtcaggatagcttctgtagtacctgagtctcagctctgaatggcccaagaatggccacactgaccagttattatctcttcagataatcacttccaaaagctaaaggtatgctccatgtgacatttcataaatggggagctgtactgagcgtacttatctgaacctttttggtttgttcttacctgtgtcatctctttgcagagtctttcactcgtctaaaataatacatcatcctgtgtgttctaatttcagaccactcgcacttctaggagcggcttttaactcctggatttgtcgaatagggcccggatttagctcatccacatgtgccttcatgacaggcccttttccagcccccttagttccgatctgcagtggcagtttcattctctttgtctgccctcaccaagccygtggatcttattcgatccctactcattccttttgcattctacacaaatttattaaatcctgctatgtacagagctctgtgctttccagagaggaaggcaatgataaggcaaaggtgttggcactgtgctgggagacactcagggtactgtaaggacacctgggagcatgctttctcgactcaggagttaggacaggtggcccagcggaaacgacatcgtgaaggttgaataggagttgggccaaagtgccggcgtgagatttcagcatctcagagcatttctccagcaccaatggtttctccttggtctagatgccatattcttggttatgtcttttttttttttttgagacgaagtcttgctcttgtgccccaggctggagtgcaatggcacaatctcggctcactgcaacctccgcctcctgggttcaagcgattctcctgcctcagcctcccaagtagctgaaattaaaggcgtctaccaccacacctggctaatttttgtattttcagtagagatggggtttcaccatgttggccagactggtcwcgaactcctgacctcaggtgatctgcccacctcggcctcccaaagtgctgggattacaggcgtgagccactgtacccggccaggcacctctttgttttagagtcctttaactggccggacgcagtggcccctgcctgtaatcctagcactttgggaggctgagatgggcagattgcctgagctcaggagtttgagaccagactggacaacrtggtgaaacccgtctctactaaaatataaaaaaatcagctgggcgtggtggtgggcgtctgtaatcccagctactcaggaggctgaggcacragaattgcttgaacctgggaggtggaggttgcaytgagccaagatcgtgccactgccttccagcttgggcagcaaagcaaaactctgtctccaaaaaaaaagagtcctttaactttccccacagcactacaatacaggggtgatggctaagtcattgtctcgyccagtgggagagccagggctcctgtagcagccacccagcctcctaatgccagtgacaggttgacccttttcgtttttgcagcacattggacctaggcagccagtgtagcctagagtgactcaggtccctttcccaagtgaccttcaatagctcagacccatcttttgaaaggtatacatttcttctctactccccatcatgcccacagatggcacacttagcaggtctttttttttaatttttttttttttgacacctcagtcttctgacagcgtgccgacaatttcacatcctattcctgtcaccaccggaagtggtaaatgtcatcacagacatggtgatgcatcctctgtcccccagctccttcgtgagaaggcatgtgcaagcattgatacctagggtctccacctgcttctcatccaggggtacccctgcgtctgtcacccatgaccacgtggctgccatgagctgcagtagcagctgctggaagcacttcccctgtactcaggaagtagagttgaaaagtgaaattggaaagttaagtggttttattatgtcatgattatgtggtacttgacatgtatgatctcatttaattattacactgctgcagagaaaatctttttcctccaattgcatagaagatgtttgaataagttgacccagggaatacagcgggtaagtggcaggatagaaatttgagcccacgttggtaggattctgaagggcatgtccttctgtccacactgcagactgacacacccagagaatacatgaggtgtcctcctaacagaccttgttccttggagggagtgggggtggggtggggagaaggaagagcttctgacctctcccttaggacttacaagataattccttctagaatcagacccacacacatggctgggcaccgtggctcacgcctgtaatccaagcactttggaaggccaaggcaggtggatcatgaagtcaggagatcgagaccatcctggctaacacagtgaaaccccgcctctaccaaaaatacaaaaaattagctgggcatggtggcaggcgcctgtagtcccagctacttgggaggctgaggcaggagaatggyatgaacccgggaggcggagtttgcagagagccgagatcgcgccactgcactccagcctgggtgacagagcgagactccatcttaaaaaaaaaaaaaaaaaaaaaaggaatcagacccacacacagccagtcctcacttaagcctaacaggttagtgatcactctctcaagatatttgcccatcaagtatctcctggacgtttgaatttattgtctttaccaattcattttcaattaaaggtataatggatttgtcatcctatagggagattgggaaaaggataatgaaggtaaggcaaaggaggtcagggcaataatgtactttgaaaaatgcggttgattggccgggcgtggtggctyacgcctgtaatcccagcactttgggaggccgaggcgggcggatcacctgaggttgggagttcaagaccagcctgaccaacatggagaaaccctgtgtctactaaaaacacaaaattagccaggygtggtggtgggcgcctgtaatcccagctactcrggaggctgaggcaggagaattgcttgaacctgggaggcggaggttgtggtgagcggcgatcgcgccattgcactccagcctgggcgacaaaagcaaagctccgtctccaaaagaaaaaaaaacaacaaaaaaaccccagaaaaacaacgaaaaatgcagtcgatccatacatgcttagaccagcgggtacaattctaggaagaaacaagaatgagaagaaagcctcagcagcagggatgcaggattgaggcacagcatataaagtaatgaaggaacaggggttctgtggccggaggatttgctcacatatcactgttaggggagccagaagccactggacaggttcagccaaaagtcagttttccatcccgaggacctgcccctgtgtcagggctcctctgtccattacagcaaattgaactggagtcatcctctgctggaccctgccccactgactcactcttgctcagagagtagcagcgatgcctctcaccactgggaaggcagcccactcctgtggatgggaaatttgttctctagtttggctgggtgtgcgtgtgtagatcagggcagaaatccagaaaagaggaggaaaaattagttaacagatgggaagataggaaaacttgcagttctcggttaatttttaaaaattgtattggctgctgtcaatgtggcaagaggccggggggcagggcagggaggtgtgggtgggtggcgaggggcaggaggtggggacagctttgaacgctgaagggtgtgtgaacaggccccacaagtggcttcattcaacaactttgtgttttgttgttgtgttgtgttttctctttcagtttcaaagaagctggcaccgattccacccaaggtcccctttggccagccgggggctatggcagaccagtccgctggccagccgtccccagtcagcctgtcccccaccccgcccagcaccccgtcaccctatggactgagctaccctcaggggtactccttggcctcgggccagctctccccagctgcagctcctcccctggcctctccytctgtctttacaagcactttgagcaaatcgcggcccactcctaagccgcgacagagacctactctgccgcctcctcagcctcccacagtaaacctctcggcctctagtccacagtccacggaggcccccatgctagatggcatgtcccctggggaaagcatgtctacaggtaaccaagccacaggctccctcacttttttttatgaactttagtgaaatgtgcctaggggagggattgctagtgttactgccagtgaacacattcctgcgtgctttgggatgactgggctggcaccaggggtagctcataagatctccttagaagcccaccaatggaaagcaaccctggaatccatgtgtcccacacaggggcttcttatgggatctctctcggtctaagcccaccagcctggggttctgtttttgctcttattatcgggggttgaagacactgagtcatttggagtggggcctcaggagaggctggaagctggttatgatcacaaaacagcatcaaaactcaggtatttcctggatagagcccaagcaactgacaggtataaatgcttatctggagaacaggggctaagaacccaagatgttttttactattactaaaataagccttgctagaaaaatatacttccagatagatatttagagaggggtgaatttcagaaaacatgcatgtctccattctcctccaccagactcccctccctggccaattccctgaggagctaattggacaaacccacaacgacttaatttagtttgggcttaaatttagaaacaaagacggagctctcttcccccagaaaaatctgtaagcacaaaatcgcaaacacacaccacgtttagccaaaaccattcattggctggaaggaacgggatgtttttggaacatctccccagacacttcaaccacataagattataaagtcaggggcctatttgtggtggctgctaaagtcatttgagcattttccttgttcagggagacaggcacagggttgagctgtgtcttgggctagagccaacccacttagtaaagtgcagtagcatggcggtgagctggagcatatgtgtacctagtgttgtcccaagtagcagaaggtgaggcagcttgggttggaacacacacaccacatacacacacacccactcacccatttcaaagaacagtgctgtcctaggatgcactgggactttttgtgataatgcacttttccctccacgtccttctccaaaagagtgatttatttcttccgtgattagacggaagcagtgaccctgtggggttcagctccgtgctgcctttgaaaaggctagtccaatttgcaagtgtttgtactgggtcagatttaaatattacggggaagagccatctggtgattcggcttctttatttttggatgtgattaatgttgaaggtacagctgctgtcatctaccccgaggcttattaaaaattaggcaaatttctccctggaaaatgcagtagcaccacgcccatcttggtgggtcttggtgctgaggtgtctcctgaaggagcccatgataggagggcacaggcttgctgccctcggggaaggtcacagctgcggaggagctgaaggtcacccgagccaggtctccagggctgctcctcccagtgtgtcacatctggtgactcttccagccaccccagggaagggacacaaggtagtgtcaatacataagcaatagaatgagcagaagatggccaggcacggtggctcacgcctgtaatcccagcactttgggaggccgaggagaattagttgggcatggtggcacgtgccactagtcccagctacttgggaggctgaggtaggagaattgcttgaacctgggaggtggagccgagattgtgccactgcattccagcctggcaacagagcgagactccatctcaaaaaaaaaaaaaaaaaaaaaaaaaaaaagaatgagcagaagatatcaatggagaagcagaaaagagcagaaggagaggagaaattggggaacaaaagtgggcaacagaaggcctgggaggacagcacccccagggctctaagaagcggagtggctcatgttccatcttgcaggtttaagaactcctgaccttcaggattcataatgtccctcgccctgtgcggaccctattttaatgtccttttggcagcagactgttgttttgtcccatacgttcaggtctctgagccagtgtagaatccatcatggtttgatgtggcccgtctgggactgtgatattggcatagctttttttttttttttttgtgacgttcatgttttgtcgtgttgattcctttctccgaatcctatcattgtgttcttgcagctgtgtgacatgagtggcgcagttttggatacgtgtgagggggattttcagggtaagctggccccggcctcgcccctccaccccgctagctagccaggccagctgcccgctcctcccctccgctcctcgtctctgcatgtggctcagaccatttgcatggcagcttcactctccagccttccccggcctcagcaaggatgagttgatccatgagcttatttggctttggggcatccctggcctccttttctttcttttcattaggaggagctgggggagaacccagccagcccctttcccccaccttctctttcactggaatcacatctgcagctcctccccctccgccctccctcaggcttagaccgtggagctgtaacagatctgttcttcgtgtgagacttttgtgctggagacgcttgtgcccagcaccctgggggacatgcacctgctcacctttgtttaggaaggcgtcctgaggggaggtcataccaggtgcagcccagcacagggtccacaccacagcttggaccccattttctgtggccccgagtttgcaccagcagatctccccttccagacttagatcctaacgtctggcttcctccaggctgagactgctggcaaatcctaaagaatccatatcggagctcatcccgctccccttctccctcatcccaagtggatatggccagacagatcctttctatccaactcaataaaatttgggggagcatttatatcagtatctatttggtctcctcctcctataaagagtaaatcctcaaagcataactgagggaaaggcacgaaggaagccagaaggactttggtgtatttgcctcagtaagtagrggtggccaaagyaaaccaggtcttctccccgatttggcccatggtcctgcagagactaccgaggcgcaccaggatatctggtgctcacagacaggtctcctggcgggtgcttcccgagtgtcctggagacaagcagccactgtgtcccttttcccaggaatgctgatgagggcttctgcccctgaatcccattcccttgcatagtgactcctcccttgggggtgtctttaagggagcagcaaggataaaggtatgacagctcacacaagtgcttgttctgggcctgtctaaattcatcaccgccctgtattattcccatttgactgctgaggcacagggaaggtaggaaacttgtccaaggtcatgctcttcctgcctgacatatttgggatttttgaatctaagcaggggagcttggtgctcttacctgatagcgaaccctgcacagtgaggtgggccccgggccactcagcctcacacctgtgtagagacatgacccaagtagctggggaagggcagaggtgggtctgaggccacctgcttcagaggaacaagtggcactggctgttcctccagccccacgccccaaatctctgcttctccatcaggcagcaaaacaaagactggaaggacgtgagggctgcctgggggttggggcaagggaggacctttgttcaagagcttccatgtttgtatgatgtctttcaggacagtgtccaaatgtatgtctgtacacttagtatggtattccccagtctgaacatgtgttcccttcctctgcctcctggagtgctgctcccagccttgcaaagctaagtgacggccagaaactaagcaggcaggccgggcgtggttgctcacgcctgtaatcccaaaactttgggaggctgaagtgggtgaatcacctgaggtcatgagttcgagaccagcctggccaacatggtgaaacccaatctctactaaaaacaccaaaaaaaaaaaaaaaaaaaaaattasccgggcrtggtggtgggtgcctgtaatcccagctactcgggaggctgaggcaggagaatcgcttgaacccaggaggcagaggttgcagtgagccgagattgtgccattgcactccagtctgtgtgacaagagcgaaactccaccccccccmaaaaaaaaaaaaaaaaaaaaaaactaagcaggcggaggaaggggacagcatgacgagagtaaaggacccaggggatctgtggttttctggctctctggctgtagcacatcctggaggagtcagcaagcacagcctcgtcagtgtcccccagggcggcggctgcagcagcaaggggattttttttaacgtggtgtggcaaagaggcttcgtgtccactcagctgccagtctaaggacttctgtcgtctttgccgactcagagacgtccagacactgagctgttatttcaagtacatttctcctgttcatcttgccgggaaaaatgaccttttaatgctcctaataaataaggatgtaaccagaggtgggggttgtcctgcagtcagggacrgttggcaccaatgacaaccagggtcctgagggagaccttctactccacccatgtcagccatccaaaatgcagctgtttcttagagtgaggacactggctcagggttccccattctctcacaggcttgagaggasaaaggggtccactgtctcacgtcctgtccctgcagattctggggaatgaaatgcagtcgtctgatatagatccccaaaaaggtgtcattgagacctactcagcatccttcttatcaagaataaaggaccctgtggcttggcagggragtgctgttctggccttcctctgaaccrcagtggcgtatcctgggtgctttggttctacgaacttatggggtagaagcaaagcaggcatgagcacracctgatcgactgtgcaacacaatgcttaaaccaacctccaaatgatytatccctagaatagcagcacccctgcctcctaaggctgacattatttgcctacaactaggttctcatttgccgggaagcctcctttcaaccacctctctctctgccgccttccagatcttgtccactttgatattccctcgatccacatagagctcgggtcgacgctccgcctgagtcccctggagcacatgcggcgacactcagtaactgacaagagggactcggaggaggagtctgagagcaccgccctctgacatgacaccgcccatcctgcctcgcgtgtacatacatcacgggccctaggaacgccgccaggagcagcgtccatgagcttgccaagtgttctctgctggctctttcctgccactgccaacacgaggttggaatttggcagaaaattgtgatctccagtccgtgtggtgatgctggtggtgcaggttttgtttgttcctttcgggtggtgacttcggccttttgtttgacctttgccttttgactttgtgcctcttttgatccactttcagcctccatgccarrmaacacccacctctccatccaaggctggtcaggaacgtcctttgcagggtcggggtggtgcgggagaggctcactttgcctggttagacccaagggctgctaccttttccttggacggctcatgtcaggtcttgcaggatcagtttaatggccacagaaaggaagcaggacagcagggcccctctcacccacaactggaccaggtccaggattctagcagtcctggggcactgacctttgccagctacctgggggagggcttgccactggaaaacctttcaggccgcccccatcagtgggctccaaagtaaatggctgaaaacaaaaatgtttcacttcctaacagttttcctttttccactgtgtgactgaaagctcctatatcattttatatttctgaatctataaaacaaaacaaacaagcctgamagtgtctggaggagccaaaggtggcctccctgtccccaaatatattggctatatgagagtaattttacccctctacgtacctaaaggcacccagttcactagtctgtggggtcctggagcctgtctcttctttctggaggttcaaactgaatagcaataattacgttacccaaagcatgtggaggaaaagtgaaaccagccacggagacgctggcccacgggctcggcctgcggtgtggcctgctttgctcaccagcgtcagccgctcatttccttctcatgaagtcccatctggtcatggggacgagggccgggagggcaccgggtagccttttcacacttggggattaggggagtgagaaaagatttgggccatgcatgcaaagtcaaagtttaaaattttatccttttcaaatagatgatataatatacctatacatgatataatatttgtatatatgaaatctctctatatttgtttaatttgagccattcaatctmaaccaatgtacaggtgtacaatgaaaaatttaaatgcttagttatttttcccaacacagtgtaaagtcaccctcctctgagagtgggatgtgcagagttttgatgttgcagctttgctcacttcctggcargggcaggtcatgcctcaatttgtaatgggagtctggggtaagggtgggggttgaaagttgttatctytaaatacatgtacaaatcgttgtcaaaagtaacgttattaaaatagatttattatccctgagcttggcatctgttcttgctttaataaacctgcggggacatggccgtcaatctcaaatgcacaccgggatggagcctgaaggtcaccacctgtgtaaagccaggtccctggctgatctctcgcttgcttgtcttttgagtttttaaagctcttctttttacattctcctgggtagggaatatacayaataaatactagattcaacttacttacttacttacttactttacttacttacttccttggaaaatgctctccatttgtcgagcactaatccacgtctgtaaatcccgcaaggaggacaatggaaaccagccccgtgtgccatttctcaaaaccttcgagggcaaagtgatcctcactcctctcagtatggaagcaacaacacagcaaatctattgtctccacttttacccagaaccaccagaagacttgcatttccctgaccaatgacaccagcccagccaggctctcactgattgatttgattgattgattgattgattgatagagaaagcacgccctgctgtgagctggcacagctcgagttgtcaaaaagacttggcgaataagggtggctctctgaggacaggttccagaggtgctcactacgacgggagctgacttcttccaagccacccgggtaccaggcagctgccacactacagcacagagagccttctccaaggtggtgcacagcagaccctgatctgtgcaggaggaagcaaaagaactcacaattgcaaactcaatctttattgcagctgaaatactattttcgttaagtctcggacacttagacccactgatcctgttactctgcttgtctctggtgtgcagggaatcattttgctggattagaggaaaggtgccgccgtctgtttccatgacttctttaaaaactgccttgaaatgaaattagttcatctgcttgcttccgtgtggcagcctcctggcccgcagctgtgccaggcaccagtcctaagaggcatctatagactagtgcttatgtgggaccccaagcctcggcacagctccataccacctatcctgagctgcctcctgggggaccgtgctcttcagcttctaccagcaaggagggcagatacgggtgcgtgcgtggggcagaagacacacagccttctgagttcagggtctcccagatcttcactgggctctgaccttcttggcctgtggctcctctgtgtgggcccgcttctgctgaggctccccatcctccaggccgcctgccagctccctggacaggagggccgcccgcacctgccgcagctcccgcttctccctgcgctcctccatctcctcgatgtcgccagcaaacagggctttcagtgggggaatcagcttgggcattgttggaaagtctccaaagcagacctagaagacacaatagaagacaaggacatgtctcagaggggcaggggtgggggacaggagctggaagggatgcagtcatgtgctcacacagcagcgccaacgccccttccttggcacaagccaacaggccacagctgaaatggaaaaaagaatggcatggagggaaccctctaaaggggcagaggctccctaggcctggctaagggcctccggagagggaagggagagcagtccagatgctctcaaaatcaagctcctgaaaaacgaggcctggctccggctctgccccttcattccggaaggccaagggtcaggcctggctttcccactcacaagaggcaaccacctgtctcacaggtctgtgctgaggctcaaatgccatgactgtgtgagcagtccaggcctaaaaggattctcagaaatttccagtgaactgagactgaagactagttggcccctgcaggaggtgggtctcaccagcaaacccagggtggttcgacctggttagtgatgggtagataaccttttcccacggtggccccaaataagaaagcaaactccagctgaccgtcctactcagtgtgtagagtcctgtctccctgccccgtccccgccctgtgctgtccgtgtgacatacagaccttcatgtggtcaaaggcaactcccactttctcgctgaagttggggctgaagagggggaccttggcatagcgctggctgaagtggttcagcataatgaactccgcgttcatccgcatccccacgctgatggcttgggacgttgtgctgcaggtgaaggacagagcagactgaagctgaactcaactgcaagactgcaaagcagacagtggcacagaccctggccatcaactgccagggcacccggggaagctggtgggttttcttaacgggcacctccgtagccagcaccatctcccctgagggccagagccttcgcacacacccctggatgaagcccaccctctgtgctggctgccaaatctgtccatgagggcacccaagagaaaccacagggcccacctggggtaatgcactctttcgttgaaattagcagccaaaaattcagtcccccagcccccgccttcccctggcaattccctgacatggcttatagtttattcagccgatttctagatgctttcaaaaaactgtgcctcactctagaatcttgcttagaaaattctgcaaaaataaaggccaagagcctgtgagcactgccacaggtcaaggaagcccccatagcccttgataggaagcagggcagccccacatcagtggagacaaacgacggctgctcagtgtcacgtagtgggggagggagaggatgtgggcgacaaggactgaccggcctttgctacctgtgtgtcttttccactgcttcctcttccaaaccatcttccagggtggcttcatgtatcaggagggtggcatctttccctggagaagcagcacaaggatcagggcagagttctctgcgagagcggcacacaggcctcagtcacgtgctgtttcctggtctcaacactcagctcccctggccctgggtctgcctactaggatgacaaccagagactctgagggtggggacctgagtctcctgcctctgctgacgtttccctgcaagcccacctgcattcacctccagctacacaaaccccagagcaacctcagggtggcttgcttcttcctctactcacccatccggaccagagcctcgcagggcatggtgtccccggaatagaccactttccagccagaggtgtgcaccagcgcacagccaaacgcatgcttgcagtgccgcaccagacaggtctgaaactgaaagggtggggctggagggctctgcagctctgctccccacctcgcccccatgatgcctgcggctgtgccccttacctcttccaaatcacatgttcgcaacagcgaactgatcaatctttccactgcaggactggagatctcagccccttcctgaaggcatttggcaggaatcatactgtaaaaagacaaaacatttaaaatgataataaacgtttcttggacatctggaaccaaagtttaagtctttggctggagaaccccaaaatcattcttaggagaaaacatgagttaaatcatagtcactatgatgaggaaacagcagtcaaatataaagagccaaaccaaagcctctaggccactgggagaaacccagcaggtgaatgctgcctccggctcaggcagcacgggccacggatggctccagcagaggggactccttccccttggggtgaggatggtgccacctgccagctagccacacacctgctatggacattctctgtgctagccactatttgggtgcttggctctggaactgtctcatcaagaaaagctgctcgaagtttagaaagcagctcagaactcaaatgaggactgggaagaaatgcttctaagaaaataagcattacatgggaactatctaatggtttctgtccttcagccaatgcacttctcccctgcttctgccatctgggaccatgtcaagggcaaggctgctgggggatattggtaactaccccagtgtccaccttgagcttctgaaggagacggcagcaagcaacagcccagggggccaggctgccctggatgctcacctgatgtggtgcaggacctcctggcactggttgtggtactgctggagccaggctttgagctggttgggggcaaccaccagcaaagggtgaagcggctttcccaaagatgcctggaacaaaaaatgcaagtgccgactcgacgacagaacatctcaataaaaactggagtgccaagaggcatggcggatgatgtgtaaaccgctgaaactcagaacgcccatcaagtgccacacttaccaaggcgcgttctctctgcagcaagatacttggcaagccctggcaaggaaacaggagacatgcgtcagccaggccccagggccatcccctccgggttagggtctgcagccctctctcttgcaggagttgccagcccgacgtcacccaccagcctctaacacagccgcagtgggggtggcacaggccgagccccctgcgccatggccctgaaatgtcacaggcagaaagcgacacgacccgtgctgggaagagggcaacggcccagggcccggcaccccaggagaccaaggtgagggtctcatagccacacctcctgcatccggtcaaagcttccgctgagcaggccgtgtgagattcaagactcaaggaaggctgggtaaactcaaacctgtcctgctgcaggaaaggaactgaacaggaagagaagacattcttgtggcgcagaaggactatgttgagttttgcaaaaaaccatttcctagccagagatgagtaacaaaagctctgggcaagtttggaagcggaggaaaagacgcagccaaagggccaactcaacgtggcagtgcctcctccaggctccagctttgtggtccagcccaacactcaccgtgtggtgatctgcgtgcaggtgggacacaaacacagcagccagggtgcccaggaccctgtccacctggtctccgtaatgacggcacagctgcccaaatgtgccctcaccacagtccagtagcagagacgtgtcggggctgcagaagagaagaggaagagagtcactgccactaggaagactgctgatggttcagaggctgatgtctgctttggacaggaccaagaagcaactgcagaaatttctgtctctcctgctttgctttgaggagctaatataaaagccaattaatttaaccataaaggtgattttacatgtgtcatcctctttatagcaaagaagtatccatggaaccctgaaaccctttcaagtagacttacacaaaggctgggcatcaaaaaaaaaaaaaaaaagtttataggaggcttaaagcatttagtcctaacaatgaatctgaccatgcagattgactgtggccacagcctctgttgaaaataccaggacaggcactgggccatatgagactctttctaggtccagctgccatcggacttttccccctttgcaagtggtcggggtttcctcagctcatgtcctcaaagacacctggtgcagggcgggctgcaggtgcttcattcagggagccagttaacgcagactcccaggtgtcactcggggtttctgacttggttttaggcagggctctggaagtctggattctgacaaacttcttgggctattctgctgtgcagtccatttcagaagctctgctccaaggcagagagagtgctgacccgctctggcctccttcattctctgggaggagccacgaacactgagagggctgcacccattttgcagagagaagccccggtgctaagacattaccttctgggggaaaaaggagtcgggaggcggaggcaaggtggcaatagcaccttcccattagcttcagctggttcaaaagctgctcgcagggtgtcaggtcaaactcaaaaagcccttcttcccccaggatctcagcccccgggagaggccggctcactccaagctgctttattgcatgtcctcatccacagagaaacacaccccagattgtatatttctgatgtcagggcacatctcgtcactgctgtatatatttaatgcactatttggttgtttatcatccaccactagcatgtaagatggcagagcaaaatttaaaacaaacctggtaattcacaatcttattttcttcacatactatctgtagagataacgtgtacatgtcacaacgcatttgactaatctctctgctgatgaccccaggcaaacccaagagaatcaactaaaaaacatgtcaaggggaatccaataaaggttctgaacacaaatgtgcaaaaccctaaagctttttaacatactaccaacaaatggctgggggacaataccatgtagcaatcaagaccccaagtccccgctcaaacttcagatgccccacttaccagctgtaggaaccatagcaagtcacctctctgaatatcaggtcactcatcaacaaaatgggtagttattcaccacttcataggattaatgtaaaaat

SEQ ID NO: 95459 - DNA, 38392 bp, Homo sapiens
tgacaccattcttttttttttttttttttttttagacggagtctcgctctgtcgctcaggctggagtgcagtggcgtgatcccagctcactgcaacctccacctcccgagttcaagcaattctcctgcctcagcctccccagtagctgggattacaggcacccgccaccacgcctaatttttgaatttttagtagagacggggtttcaccatgttggccaggctggtcaaaactcacttgttgaagccgtaacccccagtacctcaggatgtcactacatttggagatagggcctttaaggaggtgattaattaaacgaggctgttagggtagatcctaatccaagctcaccggtgtccctataagaagaggagattaggacacacgagacacaccagggcatgtgagcacacaggaaagaccacattaaggtaccgcaagaggaaggccatttgcaagccaaggagagaggcctcaggagagaccagccctgcccacactttgatcttagactttcaacctccagaactgagaaaattgaagtcttggggaagccactcagtctgtggtattttgggatggcaacctggggcgactcgggctgggcagatgctccatgccctcagcacagactcgctgagctccacgaattcccgggcaccgtgcttggccctgaggatctaaaggtaataaagcttgggtggcattaattatggcagagctgcaaccgctccaagcctgagccaggctgagctactttcctttcttctttctttctggttcccggtgtacagttatgcatcatttaatggcaaggatacgttctgggaaatgccttgttagggaaatttgtcattgcgcaaacatcacagagggcacaaacacaaacctacatggtacagcctactgcacacctgtgctgtatggtacaacctactgcgcctaggctacaaaccaggctgcatgtgactgtactaaatactgcaggcaattgcaacacaatggcaagtatttgtgtctaaatctatctaaacatggaaaagacacagtgaaaatgtggtataaaaaatcagcacctgacctgggcgctgtggctcacacctgtgatcccagcactttgggaggctgaggtgggtggatctcttgaggtcgggagttcaaggctagcctgaccaacacggagaaaccccatctctactaaaaatacaaaaaaaacagccgggtgtgatggtgcatgcctgtaatcccagctactcgggaggctgaggcaggtgaattgcttgaacccaggaggtggaggttgtggtgagccgagatcgtgccattgcactccagcctgggcaacaagagtgaaactccatctcaaaaaagaaagaaagaaagagagagagagagagagagagagagagagagagagagagagagagacagaaagaaagaaagaaagaaagaaagaaagaaagaaagaaagaaagaaagaaagaaagaaagaaagaaattagcacctgaataaggcacttaccatgaatggaacttgcaggattgtaagttgcctggggtgcatcagtgagtgaatgtgaaggtctaggacattgctgtacgtgactgcagactttttttttttttttgagactgagtctcgctctgttgcccaggctggagtgcaatggcacgatcttggctcactgcaacctccgcctcccgggttcaagtgattctcctgccttagcctcctgagcagctggggttacgggtgcccaccaccacgcctagctaatttttgtatttttagtggagacggggtttcgccatgttggccaggctggtctcaaactcctgacctcaagtcatccacccgcctgggcctcccaaagtgctgggattacagttgtgagccatcgtgcccagcccaaagtaacttttgtttcaaaaaccaattatccctctgatgcattgtggccatcaagtttggagttgttgggtttctagggctctaaaccagaaacacctcagacccaatgaagacaaaagcatctattataatgttttcctgtgtgccctggggccccatccctgtgcccaagacaccaactttctgagctttctgagagcaagaccttgttcatctttctgtacaccaaggtcttagtacagcatctagaaccctagaagagtgtctagaaactcgtgtgtgtgtgtgtgtgagtgtactgaatgaatcaatgaatgaatgtctgtgtggagaaagccagagggtatttcagacagggtcccaaagtatgtgtcccttggtcagatcaccagatcttggggatcgcaggaactgccccagctttgtaggtacaaaagtctgatttataaatatacccaagagatggccacatatgagtggactagcttatggcaaccatacttacaagcgtgtacagaagaaagtcaagttataaattatacctttgtaactacaggcatatgaaaatgtactgctcccagcattcattggccagattattctgcctggcagccatctcttcataggacccccccgtaggataatcagagggttccaagaaagcctggacttttccacgtcaagggctcttttgcaatgtgactttgatacttctcccctcaagaggtagaatataattttcctccctttgaatctaggtgggtgctgtctgtgtcttgcgttgacttctgggcctaattcttcagaagcattgcaatttcatttcatccttttggaggctgaccaccattcagagaagctcagcctaactactgaatgtggacagtctacatggatggagaggcaatgggaaatgaaccaaagcacccccagcagggccagtacccaggacccacacctgtgagtgtgaggttccactcccattgagccacccagcagccactgcaaggagcagagacaggctattcttactaaacacaaccgtgaccaacaaaaggactgaaagtgatttcaagccacaagctgcccatatacaaaatggataacaaaaagagactcaaagcaagaggaagtggctgtattatattaattgttaatatcactgacttctgaaagtctgtcgcctcgatttccactttctctgctgtcccgatggtcaggctgcctctactccagcaagtccagagacacttttctgtttcagactctctgaactatccttttggaggtaccagtcacaccaatccccttcagaaaacacatacattgttgtcttgattcaattttaggccctgcttagttgtaaactgaaaacctcatttaagctactggcttgcttctaatttcctagtatttattgtctgccacaagccagactctgtcctaggagctaatgatacagcagaggaccagatagacaaatcccaggctcatgaaatttacattccagtataacctcagattgaagaagtactagctactgtcttcatataccaggaataaaaatatgacccaaagcataagtgcagaaagtacactgggccctagaaacaacctaaatagcatccagccctcagaattttatataagtcgatgaccaaaagtgattcctcctataattttgagataagtagtttgagattacccaacagatagatatgcacatagggcaccaataaaatagaggaaccaatgtatttttgtttgtgaaatttgatatattttttaaaaggatcaaagcagtcatcacaggaaaaaaatcagtattttatttattgcactacactttttaaaagtagttttaatgaattaattttctttttctttttttttttttttttttttttgtagagagtgtctcactctgtcagccaggctggagtaaagtggtatgatcatagctcactgcagcctcaaacccctgggttcatgtgatcctcctgtctcagccttcagagtagctgggacaacaggtgcgtgccaccatgtccagctaatttttacttatttttaaattttttagtattttttggtagagatgaggtctcgctttgttgccagagctggtttgtttgtttgtttttgagatggaatctccctctgtcacccaggctggagtgcaatggtgtgatcttggctcactgcaacctctgtctctggggttcaagtgattctcctgcctcaacctccccagtagctgggattacaggcccatgcaaccactcccggctaatttttgtgtttttagtagagacggggtttcatcatgttggccaggctggtctcgaactcctgacctcaggtgatccacctgcctcggcctcccaaagtgctgggattacaggcataagccaccatgcctggccacagagcaggttttgaactactagcctgaagctattctcccgccttggcctcccaaagtgctgggattacagatatgtgccacggtgcccaggctttaagcaacttttaaaaactatcatttttatttcaaatacttatggagatggtggtatgataatcttttcagtttgtaacgccctctaactgtgtaaagtagatctgaagtgttttcctgaccctcactgggatggttatttcaagtacaaaacgttttcacaccgtgggtgataatcttccataaaaaatttcatatttgaatgaaaacagctcaagaaatacactaatgagcaaaaatatatggggaaagaggaacgtgtagttttgacttaactgaagaaaccaagaggaaactggtctccatatgaaaatgtgatcctggaaagtcaggtgtcaagattttcgagtaggaatctacatgacttgaatctcccttacttcctgaataaaagtgacatctttcagtatttatttaaaaaaatcatatgtcagtggagcttccaggtaaattatctttaaaaaatcatatttgagtggagcttccaggtaaattatcttcctcttttaagggagctccctgtatttctagcggctttaactgatatccctttcagtgagaaatcctcattagctacataagaggggactgggtgtttttttcaaaaagctggtattgggacatctacctctgtgatgtccctggtcagctatattgtctaggagttgaaacattttgtattaattttctatcatttactgggtgcctcttctgtgacagtgccactcaaaggtctattgatatattatcaggtgactgaattctatattctgaagtaggagatactgttattgctgttattacattttacacataagaaagctgaggctctgagaggtcaagatcacgcagctaacaaatgagccaagactcttgctttagagcttgtcctctattcttgcttttctttccaaaaaacactacaatttttgttttgttttgttttgttttgagacagggtctcgatgtgtcacccaggctggagtgcagtggcgcgatttcgactcaccgcaacctccgcctccgcgcttaagcgattctcctgcctcagcctcccaagtagctgggactacaagctcgggacaccacgtaaaaatgatcaagttctaacatgtatgcatacgaattacaatggaaataaaattagcaaagcgcttatgctaatgctcaatacaattgatttcctcacatttaatcctcacaaccactacaaccacctctaactcaagctctgagggactgacgtgyccggaggacacagctcttatctggtgggaacaggagcgttttagcgaaactccaaactcctaggtcccgccttccccaggaaggcttttcctggcactgtgcttccggaagtcccgccccaggagaaaaacagcttccggaaaaaattgcggccggcaaaccggaacagaactaggggcggggccgcttgagacgctctagtattcctctactctatggccrctgtcaattgacaagtcccgagcggtaaarctcctttctattggatgagcagcctcgcgtaggcgggaagctcggtgcacggcgcgctgattggctggatcsgccatgcggagcggctaggtggtgcacgggaaacgcgggcgtaggtgaccggcggctttctcagttttggtggagacgggcgcatgtgggcgctttgctcgctgctgcggtccgcggccggacgcaccatgtcgcagggacgcaccatatcgcaggcacccgcccgccgcgagcggccgcgcaaggacccgctgcggcacctgcgcacgcgagagaagcgcggaccgtcggggtgctycggcggcccaaacaccgtktacctgcaggtggtggcagcgggtagccgggactcgggcgccgcgctctacgtcttctccgagttcaaccggtcagtcaacgagccacgccccgtcccgctgggccctcagtgcggcgcagcctctgagcatcggggcacctcccagggcttcggcttccctgcttcacacatgtggttcactgttgcgggggttcgtggagttatggtgggtgggaaatccgagattctttgcatccatgtgatttctgcggatctgtgaagaacttcaggcctgggtctgagcgtccttttcccaacccttgggccycggcctggctgtcagcactttcggagctccaccctcttccgtgcaccccaaggccagtgtgtcgttgttagcgtgtggggtggacagatctggtgtgtagccggtggtggagaaaggactcattttgtcctagcacccacacacacaggcccccactcctctccacctctgctaaggagggctcaaaacccaccagcataaatgtggctcggtagtccaacgtggacttttaatttttttttcttttttttttttccagagtctacaataaaacatctaattggtgtcagagagtttacagaataaaaccttctgaatgtcttgtgtaatgtttgtcttgtaggtatctcttcaactgtggagaaggcgttcagagactcatgcaggagcacaagtgagtcagtctcttgctttcggagggggagttgattacggggcttgaaagccgaaatgagaggccagttgttttttatagcaaaagtggtccttgttctgttcatgttatcctgtttaaatgttttytcattcttaggttaaaggttgctcgcctggacaacatattcctgacacgaatgcactggtctaatgttgggggcttaagtggtgagtatattctttgcagtgtcagaggctggtgggaagtctctgggattttaaccggctttaccatttttccaagtctggggtgggcagctacttttttttttttttttttttttgtcagtggcgtgatcttggctcactgcaacctttgccttctgggctcaggtgatcccctcacctcagcctcccaaatagctgggaccacacgtgtgccccatcacacctggctaattttttttgtatgttttgtagcgacggggttttgctatgttgcccaggctggtctcaaacttctgcgatcctcctgtctyggcctcccaragtgctgggattacaggcatgagccaccgcacctggcctggaattctttttataccagcccagtcagcagcagcacagagcattaaaagctgtgactcaggagaacagattttaatatggataccacctcttaagtgttaccatccacttagtttcttgcgttgcggggacagagatttgtggcagtaaactggagagtctagcagtggtgattacagttaatatgtttaccgcagacgccattggcacattggcagccacacacatacccactgtccagattaccctgtcatttatgtctatcaaccggaaggtcaggattgtgttgcagccaaattgtgtgggcttggtggcatggaccggaaggagtgaagtgttagaccagtctcccttctcagggctgagactagggtgaggcacttagggtgccagcccttcacttgcatgattccttacattttgcacactgggtgccttgctgcttcaccctagtgacagctcagcccattctagaggcatttaaagaatatttggtgtctgttacacctctagctggcatcacttctgctctgtacatcttccctggttgtacttccaaagctggaaggtggagatgtagataaatagttggattagtacggggtgctcctcctgttagtgacgacaggtcaaattgatgagagatctgattttatgcatcctttttaggaatgattcttactttaaaggaaaccgggcttccaaagtgtgtactttctggacctccacaactggtgagtctttcctgacacatctttcaaaagcaatctttccttttgtaatatcagtaacaagaattttcctttttgcaaatcagtcttctgccctccagagatacytggtcgttgaaacgcttcccctttcaagttaaaaagacttgagttctgattaactatgtgaccttgatcaagttactttacctttctgagctttagtttattcatctataagatgactatcacgtttcatagagttgttaaagattaaatgacgtagcagcacatataaagcactaaatcactttattagatatatgtttggcaccaagtaggcacacaagaaagggcagcttttgtttttattcaataaatttctgacatcttcttacctttcagtccagcttattacactcttgagaaggcgtgtgtgtgttgttgaatataacagttcattttccagtccttaagaagaaagtcaccaagacctgttaagtctttccccaaaataacgtttgaaatccatccatttgtctcttattgaggccttccttatttctgttttctatgcctgtaaactacaatagcctcccatattcattctcgccttcctgtaatccatctgccacacagcagccagagaggtcacttyaagacagaaaagtagtgtgtcacttgccaccctaaagcccttcatgggctccccattgcaatacaatcaaaacaccttgatatggcctacaagtcctgtaggccccggccgctacccacacttccatctgtacccatcgctgaactgcagctgcrtgggctgactcttatgtccctctaactccctggccacttcaggactttcgcccttccgcgggttccctctgcctcttctaattgctgcctatattgttactgaaccttcagggctcagctagagggtcatttactccagaactgcctcttcttctctagacaagttggatcccagccytctgtattyttcattttccttgcagagcacttagcataatgccactaagctgtttctgttatcrtgtttccttttgtctcctccactggcctgattagagcaaggcctccatctctttttcctgctatatccttggcatctgatataatggatactcagtaaatatttgtaataaatgatgttcaaaatatttactaagctttgttttatgttgatacctattggtaaccttttaaatacttgaatagttgctgtgttctacatttgttcaaccataactgctcatttctttgtttttcattaggaaaaatacctcgaagcaatcaaaatattttctggtccattgaaaggaatagaactgggtacgtctttgtctgtgactcatcctctgctatttctaacttatatatgccctgacctctcaaattagaatccattaaaaacatcaacatcaaacctcaaaatcaaatgcttcatcaccacgagatttttttttttttttttttttttggatagagtcttgctttcttaccaggctggagtgcagtggcatgatctcggctcactgcaacctccacctcctgggttcaagccattctcccacctcagcctcctgagtagctaggactacaggcgcatgccatcacgctcagctaattttttgtatttttagtagagacggggtttcaccatgttggccaggatagtctcgatctcttgaccttgtgatctgcccgcctcagcctcccaaaatgagctaccatgtggctggagatgggatttctaaatagtgacattttctgtgttcccacctcatgctgtaaaaataggggccaggtcggcaggagtgattgaacagctgatgcctgcctgtgtacatgctgtgtggcattctccatccagacggcagggctcctgcctcagttccagaggtgcttctcgtcgttgagttgctttgagttgggggcgggggtgacaagggttccctagaggttttgtggccaactttgtacattgaaacgcagctccagctgcgcaggggggcttacagcctcttgatgggaagaggcctcactgaggatgctagtagggctcttgtcctggcactggtgtgtatctgtggcttgttaatactcctcttttatagaaacactaatactttgtttcaaaatatacatcagctcttctggtttgcgatgataggttccctggcttcactattctgtttgttaacttgggtctctgaaagttgagtactagtttcttgtttttcaatttttaacggatagtcaccaaagattataatgtcttttcatctggctgtagtaaatataaatggctgaccaaaatacacttttatttatttcctaaaaatggtaatctccttagaaagtctggttttcgtgtcagattcccaccataattctgaggcaattcagttgctcgtggttggtgatcctgaagttactcttcccacacatcttcactaatgcaatcactttgctgttgtgyggttttcttgtagctgtgcggccccactctgccccagaatacgaggatgaaaccatgacagtttaccagatccccatacacagtgagtatgaaagccaggtttcccaggaggagggtgtacgtcctgagtaaagaaaacatggatgaaaatagaaactgaacacttgctgtgggcaccctgttttgtgttctgagcatgattagaaaatttagttgaggaatgaagatatggctcctgccctggcttataaacttacggatgtctgacttatgcctaatgatagtgattatgctttggaatattagataatcaagcactgttggtaaatagattgcattcaagtttgcacattcattgcttggaggttttttcccacaggcgtaataccctcttttgatcagacgatcatgaagaggtttgcacagatagatttttttaaataaataatgattacagcaacctaaaagaagtgttgttgggggttagaagctcctgcaaattccgaagtatcagggccagatgatgtggtcttagcttaggaaaagagttagtcttgtccttgaacttggctaaagacattcatgtctggttttacttacatgtgaagagagtaccaagcagtaggggtatttccttgttagtactaactaatgtgatgcttacyaagtagtgctgatgggtgacagaccagagcacccagcaaaggccagagaagtccagaacctggcgaggagatgaggcttacactgactgaaggcagaaggcagcagggaggagaggaatgtgccggagcaatggcacaagtgctcctaggccagtgctgtgatgagctgatcagcactcccattgcctggcttgctcctcctgctcagatgccttctctcacctgacccctgctgtagccacccccagcctgagttgcatccacctgtttgttgtccatttccagcaccctgttcttcgctccatggcatgtgacagttaactttcatatgtgatttgcgtgatcgatgttaacatgctcagttttgccgatcactgttttttcagtgtccagcggccctcagtgagtgaacttacgttcattctcgttgcagctgtgctttagcttcttagagcagcgaatttttttcccttgatcttgagccttaactaaatgtaaaatgaggctccttcttgagataggtaccctttgggtctatgtgttttagcgggagtgatgataataaataagcatgtctacaacccacatgctgtttagataacacgttgttgagttggtactgtggccgaggctgtgagctaagcagaaacataaacattaataggacataggtgcagcccagaaaccaggtaggaagttaactaactagttatttcctactgtatagtaaaaggtgtgctgatttaattggcgttctggcattcccatgtatgaacgtctgggccttggctgtcagctcaccttgtgcagtgtgtaatttggtggtatctgtactgaccaggtgaacagaggaggggaaagcaccaaccatggcagagtccagaaaggcctctcagcaggctcagtccagagcratcttcagactccgagtygaatgaaaatgagccacaccttccacatggtaatagtataaacaaaacagagcagcagaaaggcttgcgttttcttaattctctgcctygtaatgcttgtagagagtcattattgtaagaaagccaggtgtgtaaacagatccttcttcctgggcttactataacttggcccgtkgrgggaatgagaagggttgttgtaaaggtggcagcctgsaactttaataatgaccagtccacagttttggccacccagggtctgggtaggcccaaaactgtgttctgttttcccagaggagaacagggcctgacaaacggattcattttgtatttttcattaatgtaacatttatgcaaattttccattaatgtggaaactataactgctaagccaatgagacagtcaaatcagtgagaggctctgcacgtcttccagaatgacagcccactgggaaacggagttaaaagtccaagatgagatgtagctcaggagtcaggccgcttcgggagtttgttgtccttaacagraggtcagcgttggcaaagctcggcagctcctctttctgtcctgaggtcttgtctagtgactgagaacaggctgacccctatgtgctgtccttgtttggatggcaccgggtaaagactgacaccagcattttctctgcaggcctttgaacttttgtgttatttyatatattatatgtgttataaagcacattacaatatatttttctctgtcttctccagtcctaggtgaaatgtgtcatttaaaaaaaatttcacttgccattctaaagtttttctggtgagagttttgtgtttttcatttacgcaaacacatctccacataagtagggaaaaaaagtcttcttgagtatattagtgtcttcagcctttgtattgggacagtagcgtccattaatttttatgtgaagtgaaattaggtatcgggtcataatcagtctgtgatgtcttcacagctttcacrtttaccttgtgataatcaagtgtgtttttcctcaggtgttagccagagaagaggggtcagggactcttccctggtcgtagctttcatctgtaaggtaaggaagactttccggagggctgtacatgactggggtcttggtcagcgacctctggtttgcactttttcattaatttgagggtaggcactcctgttacctgagacaagaagagatagcagatcttcagaaaagctgatggaaggccgggtgcagtggctcaygcctgtaatcccagcactttgggagtccaaggcaggtggatcacgaggtcaggagtttgagaacagcctgaccaacgtggtgaaaccctgtctgtactaaaaatacaaaaattagctgggtgtggtggcgcasgcctgtaatcccagctacttgagaggccaaggcaagagaatcgcttgaacacaggaggcggaggttgcagtgagttgagattgcaccattgcactccagcctgggtgacagagcaagactctctcaaagaaaaaaaaaattcgatagaaatgacactggcaatgagcctgcaacaagtattactactgacctttcataattgtcatcacttgtaggtttcagagtttagatgctctgtttctcaaaataaccccatacttttatttccttttaaatttttttccagtgccctgtcagcctccgtacattttttttttttttttttgagaccatgtctgtctccatcgcctaggctggagtgtgcagtggcacaatctcggctcactgcagcctccacctcccaggttcaagtgattctcctgcctcagcctcccagtagctaggattataggtgcgcgccaccacacccagttaatttttgtatttttagtagagatggggtttcaccatgttggccaggctggtttcactcctgacctcaggtgatccacccaccttggcctcccaaaatgctgggattacaggcgtgaagcactgtgcctggtccatattcttttatatttgccaatgattggtccttttagaattcagaaattattgaaggcagctgtgtttgttttccttcaactccatcaggcctttattcaaagtcttttaactctgttttactttatttcattcccctgcaatagctaaggtctaacaccagattaattggaatattagctagcattcacaaaggcctagatctgtaactctgaaattggtcaaattccattaaaaatttttgttacaataagctgtttgtaagatctgactagtggcttatttttaatagaattttgcattaaaattttatcaatacaatttgcaacaaatttgtctaaatatgtgaaaagatttcattgcctttttgtgggcttagattattttttaatgttgattttgaaatatatttggaattgttatctaaattctaaaagctacaagtgaaaataataatgaaagtaagtagttaatattagtggcaagatcattgccagtatcatttctatcgatttatttgaataatgtgattttcataaaagttaagtactactgttaacaggcttattacttgtatgtttctgagttttagatagcaaaatcattttttaaagttttaaaaatattttatttttgataatctatatttatattgtctgatttttaaactgttttctatggtaatctttaaatcgtattcctgctttccggaataggtaacagtgagcatgatgaaaagtgacaagctcacttttacacactcgggcagttgccctattatcaggcagccgttcctgggggctgccagctgcctgccctggcttttccatctccttccttgctgtcttctgcggctccttctgagggctgctgtcactggattagcctataacgcctttcccctcttctaattaatttgctgctctcaggtgaggttttggaaagcaataaagctgagctaggtcaagttccaggagtctcttggcatgaggacctgaaaaactcatctgttggaagacctcggctttgggcagctggtgcactgttggggcgttattggctgcgttctggctctcatcagtcttccagatactctgcattcctcagagaggaacatatctccatgggttgagttcagctcccagggagatgggtttccctgccttaagtcggcaagtacctttttttttctttttttgagacagagtctcgctctgtcaccaggctggagtgcagtggtgcgatctkggctcactgcaacctctgcctcccagggtcaagcagttctcctgcctcagcctcccgagtagctgggactacaggagcgcaccaccatgcccagctaatttttgtatttttttagtagagacggggtttcaccatgttggccaggatggtctggatctcttgatttcctgatccgcctgccttggcctcccaaagtgctgggattacaggcgtgagccatcatgaccagcctttatgtttctttgtttgttttgtttttctgagatggagtctcgctctgttgcccaggctggagtgcagtgttgccatctcgacttactgcaacctctgccttccaggttcaagtgattccttgcctcagcctcccgtgtagctgggatcacaggtgcctgccaccatgcccggctaatttttgtattgttagtagacacagggtttcgccatgttggccaggctagtctcgaactcctgacctcaagtgatctgccttcctcagcctcctaaagtgctggggttacaggagtgaaccaccatgcccagccttcaattaccttttatttattttatttatttatttatttttgagacggagtctttctgtgttgcccaggctggagtgcggtggcgcaatcttagctcactgcaacctcctcctcccaggctcaagtgattctcatgcatcagcttcccgagtagctgggacttcaggtgcccgccaccacacttggctaatttttgtgtttttagtagagacggggtttcaccatgttggccaggctggtcttgaatttctgacctcaaatgatcctcctgcttcagcctcccaaagtgctgggattacaggcgtgagccactgcccccaacagcaagtaccttttaaacattagagacatttagttgccatcctcaaacccgtttgggtgtgtggagagaatgttgggtcgtgacatggttgttagttatctaaagatgtcagccatcaatcatcactgtgtgatgtgcacactgaagctgtaatccttcatctaggatgatattttttaagatggaaaattctacaaccctgagaataaggatttcagatccaaatttgagactcagccctacgagtaactctttaacttcagagagttaaaagaagatgcacagttgatgaagatttaaaggagaaaatggaaatcaaatgtcatttagcactcaaaggcctacatgtcatttctgacatttttctgtttgtgtgaaattttttttttcctataaaatgattgtgaagttttctggtagaattattgtttgcctttctaatgtaatagcatattagggtttttttttttttctttttctttttttgagacagagtctcactctgtcgcccaggctggagtgcagtggcacgatctcgggtcactgcaatcttccgcctcctgggttcctgcctcagcctcccgagtagctgggactacaggcgcacgtcaccacacccggctaattttttgtatttttagtagtgacagggattcaccgtcttagccagggtggtcttgatctcctgacctcatgatctacccgcctcggcttcccaaagtgctgggattacaggcatgagccgctgtgcctggctattagagattttttattataatttatctccaagataaaagcagtgacattatattgccacataattgaaaaatmcaagagaaataaaaatcatccatgcttttgttagcctatcactgtcattgaaatattatgttacatggcagtttgcttgctggttgctctgttaggcaacgctctggtgacattcctttagctattaattgaggaatgtagaatgacagaacagtgtttctcctcaatgatacttgaaggatatttattaactttcatattgaattacattttattaaatttataatgagttaatgctgggaaataaaacactgatttaagtcattttggcttttagtactaaagcatttgacaataaatgacttcttcagaatatggtataccttctgaaagcaataaacgcattttaatgaattgtaaggaaacaacatcattttattttttatttttttttttgagacagactttcgcttttgttgcctaggctggagtgcaatggcgcgatctcggctsactgcaacatccgcctctgggttcaagcgattctcctgcctcagcttcctgagttgctgggattacaggcacgtgccaccacgcctggccaattttgtatttttagtagagacggggtttctccacgttggtcaggctggtctcaaactcctgacctcaggtgatctgcccgcctcagcctccgaaagtactggaattacaggcgtgagccaccgtgcctggccaacattattatttttttttaatctagaaaaatacacttctaagaaaattgattaaaaccaaccttcttcattagcccctaagatcacatctatgttctctttgttgcagcttcacttaaagagaggaaacttcttggtgctcaaagcaaaggagatgggcctcccagtgtgagtgtggggggtaaggcttctggggactcactgggtacacctgtccacttaaggaaatcacatttcacagagkccttgcctcttcatttcagtgggacagctgccatcgctcccatcattgctgctgtcaaggacgggaaaagcatcactcatgaaggaagagaggtgagatgcctggttttcttgattcagcagttacaggtagggtctgaaatgctgggcagagtctgtcttcttcaggccctacagacaccacttttgaaggacgtggaacagtttggacatcactcagctaagtgataaaatggcctcttttatctgtgtttgtcccgcatgtcaacacggctgcattcgagcatttttgtagattgtccatttaggatctagtcaccgtcctccttaaagggtgcatgctttccttggtacttgagctcaggacagtgtctaacaacagaccccatatggatgggcctggggtttatggtccagaggaatgccacwgtattctatgtcaagatatttcctctgacttctgaggacattaggaccagtggccacagactgaagaaaaccttaatgccaagcctcctttcctggccagtgtaggcctgaagtgcctcaacctgacagttacctgtttaggtatccacaaagagaccagaagggtgttgatggtgatgtgtaaagttggttttgtgctttgtttacctctcagctcactggataggatatgtcatgttagcagttgccttgaaggcagttcagtttggtggctgagctgtgacccccagtgggcgggcttatttggttttgcagattttggctgaagagctgtgtactcctccagatcctggtgctgcttttgtggtggtagaatgtccagatgaaagcttcattcaacccatctgtgagaatgccacctttcagaggtaatgaggggtctctagggtgggagaagtgagagctgaaacccagcccagcatcgacwtgggcatcttgtggcaagagctgtgtttctgggaagaccactrtctgggtttacagttcagaggccggcactcctgccttaagtcactgttggtagttggtgggctccrgtgtacacagcctcaaagtgaaattagaaaagattgaaaactagaaacaactgaggactagaaattcaactagaactcttacagctcttataccagaagaaattctagaacttttttgaattctaactaatgccccagattatcatttggattattttgaactgaattaattttcttccattacctgcattgaaacaaatgaggtgggtcagagtgtgtgagactgtcgtggtcaagagtccgtgttatgggatggactcacagctggggaatgtcttttgkgctaactgccactctgttgttgtcctctatcgaagttaaccagttttgcggttcagctttcattccagatggaatcatctttgacccacctatctgagtttgaatcttttcccccactcttaatggtttacctgtatttttcctgttcctagtttgtatctatctgtattttttcacttgtttttttctacttaccacaacaaatccttttgggctgctgtaccccttccgagtcagagcgttaggagttgtttcatggtctgctttattctctgtgggtgaatttggatgcgctggtagccccggctttgtattttaatccagttttgggcagcaaaacctcttcaatgaatcaggtgtcatttgagagccatgtgtggatgtgtgatgatgctgggatagataaaaatagctactgtgtatatttctttttaaagggaactggagggaaacacatcagcatgttagtaagtggtctgttgtccaggtggtgaaatttcagatgattttcatttctcgtgcctgtgtctcaggtcctctggaaggcagacaccagggtggcattggaggtgcaggaggtttattcgaggaaatttgactgtgagagaggaaggagagagggagcaggaggaggcagggagagcctgggtctggctttgcaggttggacccgtatgagtggagagggtaggaaggaagtgcagtgctgagaaaggatcagccaggcctactggaaagcccagagcagagcttgccagatacaggaatcccacgtccattggaaatggcccagcaccggggtctgccgtgagcagcctgctgtgagagcatggcctgggcgtggaggctgtcagctcactgcagtgctgcagagggccgcacgatacccctccctggctgcgtggtccctgtcttggtgtgtcctgagtctgcatcactttgtaaagccccactcttctgcccaggtaccaaggaaaggcagatgcccccgtggccttggtggttcacatggccccagcatctgtgcttgtggacagcaggtaccagcagtggatggagaggtatggagcccagcccagcggcacttggggtaactcttctgggcagtggtggattcccctttcctcccctcgtgctctttccagcgctacytacccttctgcacctgcctaaactttctgtgggattcctgccttcccagaattctaggcttcccagatctgtgctacactcgtgaagaaaatgcaccgctaggtggcgcagtgtccacacgattccatttattttacaccctccacactcttcagggtgtctgaacaaatactgccgtttggttgaggattccataagtgaattccaaagaagagattgcagctataaaatgatagcttccatttactgaatgcccactttgtgggaggcagtgtgtgaaatacccttcatttcacttcatttcctctagggtcgtcgccagcagccctgggaggtagatgtttagtcactggaaggcatctttttcctcggggcatcgctggccagggccaggtggaggagtatgagttgagctcgggtgcggggtgaccttgggctgctttttggcccctgcccgtatctccccacatggcccgtttacctgcccctcactccatggcctgctctcctgctgtctctttcattcctcagggtttgggtcccctatttgtatgccctggacatcttctttttcttgtttttcctctcactcttcccagcacacctgaaaggcagctgagctagggaacaccgggctttgagacagcaggagtgggaccatgtttggccatgtagtaacactgcttggggcaagtcactgaactgtttgaacacctcatcctcattaccactcctgagctcagcaccactcctcagggggagctgcctcctaacagacgctgcaaatgccgggtctgtttcttcacaggtttgggcctgacacccagcacttggtcctgaatgagaactgtgcctcagttcacaaccttcgcagccacaagattcaaacccagctcaacctcatccacccggacatcttccccctgctcaccagtttccgctgtaaggtagtgtctcagacyggccccttgtcggcccagctctcgtcccctctctttctctccatgaatgtgttttgtctctttcagaaggagggccccaccctcagtgtgcccatggttcagggtgaatgcctcctcaagtaccagctccgtcccaggagggagtggcagaggtctgtgccatcttgawctaatggaatcgtctcagtcgagttgggaaacatttctgtaaatagccacatagtaaatgttccaggaggctctccagaccatatggtctctgttgtaactattcaactcsgctttgagcacaaaagaaacacggacaataagctaatgaatgggcttggctgtgtgccagcgtgaatttatttagaaaagcagcctactccaggctgggttgaggtgggcggattggggccagtagttctccttttccaaaattgccttgcatgggaatagcagtgatagagctcgtgtgtttcacagtatagaaaataggaaatgtgtgatgaacaaagtcacccataatcctgttgcccagagataatgattgataacattttgtgtttcttgatttgtgtatgtgggtttatattgtcagtcttttcctgtatcactaaacagtcttaagtaacaagatttttattggtattccaaatagggatgtttactcatttgggatgtttccaattttttgttgtttttaatgaatgaaacaataaatgtcttatatataaatctttgatgggaactctgttcccttcaagtcattcctaaatgtgggattactggcccagagtgtgagacttgttaaggtacttgataaatgtaagatgccatcttgaaagcctcttccagtacaatccaaccaggaaagtgaacagccttactgccccacatctttattttaattaattaatttatttattttatttatttatttatttttttgagacggagtttcactcttgttgcccaggctggagtgcaatggcgtgatctcagctcactgcaacctccgcctcccgggttcaagcatttctcctgccccagcctcccgaatagctggaattacaggcgcctgctaccacgcccggctaattttttgtaattttagcagagacgggtttcaccatgttggcaggctggtctcgaactcctgacctcaggtgatccacccacctcagcctcccaaagtgttgggattacaggcgtgagccgtgcccggcctgttttaatttttaaggatctgaaccttgattttaagtttcctgcccactccacagtatttgtattagaatagagcatgtgctggattatgactggatgctgtgtgctgttgaggttgggtagttggggccctttaagagactatactagcaagactcgggcccacaggcaacatcacggggttgaagaacctggtgtccctttgttggcatctgcgcaggctcttaacacacagcagcgatacacagccctagccgacattcagatttaccttgtgcttgtgaaaaatattgcacagggcctgccctagacctagtgaattagaatcttgagagttaggcttgggactcacaagctcccagatgattttaatgctcagcgaggttgaagagccgcctgtccaaggagttgccactccgtgtgatctggggcttgctaggaaagtgggatctcaggcctcactgcagagctgccgaactggcttctgcgttttgccaaggttcctgggtgtgaacatgagtttcagagtcactcctctagggcccctgcttctcagctcggaccattgacccctcagaggacatttggcaacatctggaaacgttcttggttgtcacagcctaggaggtgggtagtggtgctgctagtgggtagaggtcaggggtactgcaccaggacagcagcactggccacagaaaaaaactgtcttgccctgagcatcagtagttccccgttgactggccctgaggcagagcgatgcagcatccaaaaggcggtggagcagacctgccccagatcctagtcacttaaccttcagtgttgatctgaaggaacttcctgcagattgtccccctgaatttattctggacatccccaatggggtctgctgaggccatataccctgtccgtcacctgagatgcttctctctctycctgcaggratgccattattacttgcaatcctgaggaattcatagttgaggcgctgcagcttcccaacttccagcagagcgtgcaggagtacaggaggagtgcgcaggacggcccagccccagcaggtgagtgggagcccacagagcagcctttctttcctgggctctgcccctgctgctgttttcctagcattaagtggagtgctggtggggcgcattctaacctggcttttcagtctaatccagggcttctctactcagctctacattagaattatagtcattggaggagggggctttggggagtttaagaatcccaattcctggctgggcgcggtggctcacacctgtaatcccagcacttcgggaggccgaggcaggtggatcgcgaggtcgggagatcgagaccatcctggctaacatgatgaaaccccgtctctactaaaaatacaaaaattagctgggcgtggcggcgggcgcctgtagtcccagctactcgggagactgaggcaggagaatggcgagaacccgggaggcggagcttgcagtgagccaaggtcgtgccactgcgctccagcctggacgacagagtgagactccgtctcaaaaaaaaaaaatcccaattcctgtgccccatcccacccaatcagagcatttggcgatggcacccaggcattcttggcaaggcacgcactgagtgaaacgttttagtgaacacctgtggaaagagctctgagcagggacttggctggcagagatctagtcctggctttgcggatgcaaatccatggaggatcttggccacgtcactcaactgaggctgagggccgggcacaggctttggaaccatcgggtctccctggatttgaatcctgaccctgcctcttaccatcttcactggagacctgggcstctgagcctgtttcccccttgggaagcagagcatttcctacctggtagggctgggaggatgcgaccgaagtgcatggtcttgcagtgagagctggatgcaaggcacacactgttctcttgaaataaatgacagttcccagcataaagaaatgtcattttttaaatgtaaaagaattacagcaattcttttgaagaaaggactggagaatttatttgttcttcttagccttttggtgacagatagcctgtgggtcccacactggtgcgaagtcctttgtttcagagcggttgccaggggcctgccagtcyccctcctgggaagctggatagaactatgttgcttacccatctgtcttagtctgtgttttgttattataaaagaatatgtgagactgggtaatttatcaagaaaagaggtgtatttagttcacggttctgcgggctgagaattgaaggtcacggccctagcttccagtgaaggcttccatgctgcatcataacgtggcagaggagcgcaagtaggaagtggacgcttgtgaagacgggataacctgagctgcactctggctttataacaacccccctctcctgggaacaaatccattcccttgagaagtaatgcagtctcctgagagccagtacttactactgcagctccaagccactcaggagggtccgtccctgtagcccaaacgccttccactaggccccgcctcccaaaaccgccatactagggagcacgtttccacatgaggtctggggacaaaccaatgacactcaaaccattgcaccttctcatggctgcatgctggctcacttttgacccaaaggaatggattgtttcacatggattttttcacagagaaaagaagtcagtacccagaaatcatcttccttggaacagggtctgccatcccgatgaagattcgaaatgtcagtgccacacttgtcaacataaggtatgctgctttcccaggaagcatccttccatcaagggcaygtttactttttaaacaaaagtcctgctgtactcaccagtcgatttgaaatgcggtatcaagccctgtcacttgtcatgtcgactggagtgtccaggagaggagcgtggccttactgcattttatagcctcagtagcaaactttaccctgggaatcaccaaaattcatcccatgatgtcttttaataaacagctgattttactgtgggcagtacacctagctaagaaattagctcctttaatttttacattaatcctatgaagtggtgaataactacccattttgttgatgagtgacctgatattcagagaggtgacttgctatggttcctacagctggtaagtggggcatctgaagtttgagcggggacttggggtcttgattgctacatggtattgtcccccagccatttgttggtagtatgttaaaaagctttagggttttgcacatttgtgttcagaacctttattggattccccttgacatgttttttagttgattctcttgggtttgcctggggtcatcagcagagagattagtcaaatgcgttgtgacatgtacacgttatctctacagatagtatgtgaagaaaataagattgtgaattaccaggtttgttttaaattttgctctgccatcttacatgctagtggtggatgataaacaaccaaatagtgcattaaatatatacagcagtgacgagatgtgccctgacatcagaaatatacaatctggggtgtgtttctctgtggatgaggacatgcaataaagcagcttggagtgagccggcctctcccgggggctgagatcctgggggaagaagggctttttgagtttgacctgacaccctgcgagcagcttttgaaccagctgaagctaatgggaaggtgctattgccaccttgcctccgcctcccgactcctttttcccccagaaggtaatgtcttagcaccggggcttctctctgcaaaatgggtgcagccctctcagtgttcgtggctcctcccagagaatgaaggaggccagagcgggtcagcactctctctgccttggagcagagcttctgaaatggactgcacagcagaatagcccaagaagtttgtcagaatccagacttccagagccctgcctaaaaccaagtcagaaaccccgagtgacacctgggagtctgcgttaactggctccctgaatgaagcacctgcagcccgccctgcaccaggtgtctttgaggacatgagctgaggaaaccccgaccacttgcaaagggggaaaagtccgatggcagctggacctagaaagagtctcatatggcccagtgcctgtcctggtattttcaacagaggctgtggccacagtcaatctgcatggtcagattcattgttaggactaaatgctttaagcctcctataaactttttttttttttttttgatgcccagcctttgtgtaagtctacttgaaagggtttcagggttccatggatacttctttgctataaagaggatgacacatgtaaaatcacctttatggttaaattaattggcttttatattagctcctcaaagcaaagcaggagagacagaaatttctgcagttgcttcttggtcctgtccaaagcagacatcagcctctgaaccatcagcagtcttcctagtggcagtgactctcttcctcttctcttctgcagccccgacacgtctctgctactggactgtggtgagggcacrtttgggcagctgtgccgtcattacggagaccaggtggacagggtcctgggcaccctggctrctgtgtttgtgtcccacctgcacgcagatcaccacacggtgagtgttgggctggaccacaaagctggagcctggaggaggcactgccacgttgagttggccctttggctgcgtcttttcctccgcttccaaacttgcccagagcttttgttactcatctctggctaggaaatggtyttttgcaaaactcaacatagtccttctgcgccacaagaatgtcttctcttcctgttcagttcctttcctgcagcaggacaggtttgagtttacccagccttccttgagtcttgaatctcacacggcctgctcagcggaagctttgaccggatgcaggaggtgtggctrtgagaccctcaccttggtctcctggggtgccgggccctgggccgttgccctcttcccagcacgggtcgtgtcgctttctgcctgtgacatttcagggccatggcgcagggggctcggcctgtgccacccccactgcggctgtgttagaggctggtgggtgacgtcgggctggcaactcctgcaagagagagggctgcagaccctaacccggaggggatggccctggggcctggctgacgcatgtctcctgtttccttgccagggcttgccaagtatcttgctgcagagagaacgcgccttggtaagtgtggcacttgatgggcgttctgagtttcagcrgtttacacatcatccgccatgcctcttggcactccagtttttattgagatgttctgtcgtcgagtcggcacttgcattttttgttccaggcatctttgggaaagccgcttcaccctttgctggtggttgcccccaaccagctcaaagcctggctccagcagtaccacaaccagtgccaggaggtcctgcaccacatcaggtgagcatccagggcagcctggcccsctgggctgttgcttgctgccgtctccttcagaagctcaaggtggacactggggtagttaycaatatcccccagcagccttgcccttgacatggtcccagatggcagaagcaggggagaagtgcattggctgaaggacagaaaccattagatagttcccatgtaatgcttattttcttagaagcatttcttcccagtcctcatttgasttctgagctgctttctaaacttcgagcagcttttcttgatgagacagttccagagccaagcacccaaatagtggctagcacagagaatgtccatagcaggtgtgtggctagctggcaggtggcaccatcctcaccccaaggggaaggagtcccctctgctggagccatccgtggcccgtgctgcctgagccggaggcagcattcacctgctgggtttctcccagtggcctagaggctttggtttggctctttatattygactgctgtttcctcatcatagtgactatgatttaactcatgttttctcctaagaatgattttggggttctccakccaaagacttaaactttggttccagatgtccaagaaacgtttattatcattttaaatgttttgtctttttacagtatgattcctgccaaatgccttcaggaaggggctgagatctccagtcctgcagtggaaagattgatcagttcgctgttgcgaacrtgtgatttggaagaggtaaggggcacagccgcaggcatcatgggggcgaggtggggagcagagctgcagagccctccagccccaccctttcagtttcagacctgtctggtgcggcactgcaagcatgcgtttggctgtgcgctggtgcacacctctggctggaaagtggtctattccggggacaccatgccctgcgaggctctggtccggatgggtgagtagaggaagaagcaagccaccctgaggttgctctggggtttgtgtagctggaggtgaatgcaggtgggcttgcagggaaacgtcagcagaggcaggagactcaggtccccaccctcagagtctctggttgtcatcctagtaggcagacccagggccaggggagctgagtgttgagaccaggaaacagcacgtgactgaggcctgtgtgccgctctcgcagagaactctgccctgatccttgtgctgcttctccagggaaagatgccaccctcctgatacatgaagccaccctggaagatggtttggaagaggaagcagtggaaaagacacacaggtagcaaaggccggtcagtccttgtcgcccacatcctctccctcccccactacgtgacactgagcagccgtcrtttgtctccactgatgtggggctgccctgcttcctatcaagggctatgggggcttccttgacctgtggcagtgctcacaggctcttggcctttatttttgcagaattttctaagcaagattctagagtgaggcacagttttttgaaagcatctagaaatcggctgaataaactataagccatgtcagggaattgccaggggaaggcgggggctgggggactgaatttttggctgctaatttcaacgaaagagtgcattaccccaggtgggccctgtggtttctcttgggtgccctcatggacagatttggcagccagcacagagggtgggcttcatccaggggtgtgtgcgaaggctctggccctcaggggagatkgtgctggctacggaggtgcccgttaagaaaacccaccagcttccccgggtgccctggcagttgatggccagggtctgtgccactgtctgctttgcagtcttgcagttgagttcagcttcagtctgctctgtcyttcacctgcagcacaacgtcccaagccatcagygtggggatgcggatgaacgcggagttcattatgctgaaccacttcagccagcgctatgccaaggtccccctcttcagccccaacttcagcgagaaagtgggagttgcctttgaccacatgaaggtctgtatgtcacacggacagcacagggcggggacggggcarggagacaggactctacacactgagtaggacggtcagctggagtttgctttcttatttggggccaccgtgggaaaaggttatctacccatcactaaccaggtcgaaccaccctgggtttgctggtgagacccacctcctgcaggggccaactagtcttcagtctcagttcactggaaatttctgagaatccttttaggcctggactgctcacacagtcatggcatttgagcctcagcacagacctgtgagacaggtggttgcctcttgtgagtgggaaagccaggcctgacccttggccttccggaatgaaggggcagagccggagccaggcctcgtttttcaggagcttgattttgagagcatctggactgctctcccttccctctccggaggcccttagccaggcctrgggagcctctgcccctttagagggttccctccatgccattcttttttccatttcagctgtggcctgttggcttgtgccaaggaaggggcgttggcgctgctgtgtgagcacatgactgcatcccttccagctcctgtcccccacccctgcccctctgagacatgtccttgtcttctattgtgtcttctaggtctgctttggagactttccaacaatgcccaagctgattcccccactgaaagccctgtttgctggcgacatcgaggagatggaggagcrcagggagaagcgggagctgcggcaggtgcgggcggccctcctgtccagggagctggcaggcggcctggaggatsgggagcctcagcagaagcgggcccacacagaggagccacaggccaagaaggtcagagcccagtgaagatctgggagaccctgaactcagaaggctgtgtgtcttctgccccacgcacgcacccgtrtctgccctccttgctggtagaagctgaagagcacggtcccccaggaggcagctcaggataggtggtatggagctgtgccgaggcttgggstcccacataagcactagtctatagatgcctcttaggactggtgcctggcacagcygcgggccaggaggctgccacacggaagcaagcagatgaactaatttcatttcaaggcagtttttaaagaagtcwtggaaacagacggcggcacctttcctctaatccagcaaartgattccctgcacaccagagacaagcagagtaacaggatcagtgggtytaagtgtccgagacttaacgaaaatagtatttcagctgcaataaagattgagtttgcaattgtgagttcttttgcttcctcctgcacagakcagggtctgctgtgcaccaccttggagaaggctctctgtgctgtagtgtggcagctgcctggtacccgggtggcttggaagaagtcagctcccgtcgtagtgagcacctctggaacctgtcctcagagagccacccttattcgccaagtctttttgacaactcgagctgtgccagctcacagcagggcgtgctttctcwmtcaatcaatcaatcaatcaatcaaatcaatcagtgagagcctggctgggctggtgtcattggtcagggaaatgcaagtcttctggtggttctgggtaaaagtggagacaatagatttgctgtgttgttgcttccatactgagaggagtgaggatcactttgccctcgaaggttttgagaaatggcacacggggctggtttccattgtcctccttgcgggatttacagacgtggattagtgctcgacaaatggagagcattttccaaggaagtaagtaagtaaagtaagtaagtaagtaagtaagttgaatctagtatttattrtgtatattccctacccaggagaatgtaaaaagaagagctttaaaaactcaaaagacaagcaagcgagagatcagccagggacctggctttacacaggtggtgaccttcaggctccatcccggtgtgcatttgagattgacggccatgtccccgcaggtttattaaagcaagaacagatgccaagctcagggataataaatctattttaataacgttacttttgacaacgatttgtacatgtatttaragataacaactttcaacccccacccttaccccagactcccattacaaattgaggcatgacctgcccytgccaggaagtgagcaaagctgcaacatcaaaactctgcacatcccactctcagaggagggtgactttacactgtgttgggaaaaataactaagcatttaaatttttcattgtacacctgtacattggttkagattgaatggctcaaattaaacaaatatagagagatttcatatatacaaatattatatcatgtataggtatattatatcatctatttgaaaaggataaaattttaaactttgactttgcatgcatggcccaaatcttttctcactcccctaatccccaagtgtgaaaaggctacccggtgccctcccggccctcgtccccatgaccagatgggacttcatgagaaggaaatgagcggctgacgctggtgagcaaagcaggccacaccgcaggccgagcccgtgggccagcgtctccgtggctggtttcacttttcctccacatgctttgggtaacgtaattattgctattcagtttgaacctccagaaagaagagacaggctccaggaccccacagactagtgaactgggtgcctttaggtacgtagaggggtaaaattactctcatatagccaatatatttggggacagggaggccacctttggctcctccagacactgtcaggcttgtttgttttgttttatagattcagaaatataaaatgatataggagctttcagtcacacagtggaaaaaggaaaactgttaggaagtgaaacatttttgttttcagccatttactttggagcccactgatgggggcggcctgaaaggttttccagtggcaagccctcccccaggtagctggcaaaggtcagtgccccaggactgctagaatcctggacctggtccagttgtgggtgagaggggccctgctgtcctgcttcctttctgtggccattaaactgatcctgcaagacctgacatgagccgtccaaggaaaaggtagcagcccttgggtctaaccaggcaaagtgagcctctcccgcaccaccccgaccctgcaaaggacgttcctgaccagccttggatggagaggtgggtgttkyytggcatggaggctgaaagtggatcaaaagaggcacaaagtcaaaaggcaaaggtcaaacaaaaggccgaagtcaccacccgaaaggaacaaacaaaacctgcaccaccagcatcaccacacggactggagatcacaattttctgccaaattccaacctcgtgttggcagtggcaggaaagagccagcagagaacacttggcaagctcatggacgctgctcctggcggcgttcctagggcccgtgatgtatgtacacgcgaggcaggatgggcggtgtcatgtcagagggcggtgctctcagactcctcctccgagtccctcttgtcagttactgagtgtcgccgcatgtgctccaggggactcaggcggagcgtcgacccgagctctatgtggatcgagggaatatcaaagtggacaagatctggaaggcggcagagagagaggtggttgaaaggaggcttcccggcaaatgagaacctagttgtaggcaaataatgtcagccttaggaggcaggggtgctgctattctagggatagatcatttggaggttggtttaagcattgtgttgcacagtcgatcaggttgtgctcatgcctgctttgcttctaccccataagttcgtagaaccaaagcacccaggatacgccactgtggttcagaggaaggccagaacagcactcccctgccaagccacagggtcctttattcttgataagaaggatgctgagtaggtctcaatgacacctttttggggatctatatcagacgactgcatttcattccccagaatctgcagggacaggacgtgagacagtggacccctttctcctctcaagcctgtgagagaatggggaaccctgagccagtgtcctcactctaagaaacagctgcattttggatggctgacatgggtggagtagaaggtctccctcaggaccctggttgtcattggtgccaaccgtccctgactgcaggacaacccccacctctggttacatccttatttattaggagcattaaaaggtcatttttcccggcaagatgaacaggagaaatgtacttgaaataacagctcagtgtctggacgtctctgagtcggcaaagacgacagaagtccttagactggcagctgagtggacacgaagcctctttgccacaccacgttaaaaaaaatccccttgctgctgcagccgccgccctgggggacactgacgaggctgtgcttgctgactcctccaggatgtgctacagccagagagccagaaaaccacagatcccctgggtcctttactctcgtcatgctgtccccttcctccgcctgcttagttttttttttttttttttttttttggggggggtggagtttcgctcttgtcacacagactggagtgcaatggcacaatctcggctcactgcaacctctgcctcctgggttcaagcgattctcctgcctcagcctcccgagtagctgggattacaggcacccaccaccatgcccggctaattttttttttttttttttttttggtgtttttagtagagattgggtttcaccatgttggccaggctggtctcgaactcatgacctcaggtgattcacccacttcagcctcccaaagttttgggattacaggcgtgagcaaccacgcccggcctgcctgcttagtttctggccgtcacttagctttgcaaggctgggagcagcactccaggaggcagaggaagggaacacatgttcagactggggaataccatactaagtgtacagacatacatttggacactgtcctgaaagacatcatacaaacatggaagctcttgaacaaaggtcctcccttgccccaacccccaggcagccctcacgtccttccagtctttgttttgctgcctgatggagaagcagagatttggggcgtggggctggaggaacagccagtgccacttgttcctctgaagcaggtggcctcagacccacctctgcccttccccagctacttgggtcatgtctctacacaggtgtgaggctgagtggcccggggcccacctcactgtgcagggttcgctatcaggtaagagcaccaagctcccctgcttagattcaaaaatcccaaatatgtcaggcaggaagagcatgaccttggacaagtttcctaccttccctgtgcctcagcagtcaaatgggaataatacagggcggtgatgaatttagacaggcccagaacaagcacttgtgtgagctgtcatacctttatccttgctgctcccttaaagacacccccaagggaggagtcactatgcaagggaatgggattcaggggcagaagccctcatcagcattcctgggaaaagggacacagtggctgcttgtctccaggacactcgggaagcacccgccaggagacctgtctgtgagcaccagatatcctggtgcgcctcggtagtctctgcaggaccatgggccaaatcggggagaagacctggtttgctttggccacccctacttactgaggcaaatacaccaaagtccttctggcttccttcgtgcctttccctcagttatgctttgaggatttactctttataggaggaggagaccaaatagatactgatataaatgctcccccaaattttattgagttggatagaaaggatctgtctggccatatccacttgggatgagggagaaggggagcgggatgagctccgatatggattctttaggatttgccagcagtctcagcctggaggaagccagacgttaggatctaagtctggaaggggagatctgctggtgcaaactcggggccacagaaaatggggtccaagctgtggtgtggaccctgtgctgggctgcacctggtatgacctcccctcaggacgccttcctaaacaaaggtgagcaggtgcatgtcccccagggtgctgggcacaagcgtctccagcacaaaagtctcacacgaagaacagatctgttacagctccacggtctaagcctgagggagggcggagggggaggagctgcagatgtgattccagtgaaagagaaggtgggggaaaggggctggctgggttctcccccagctcctcctaatgaaaagaaagaaaaggaggccagggatgccccaaagccaaataagctcatggatcaactcatccttgctgaggccggggaaggctggagagtgaagctgccatgcaaatggtctgagccacatgcagagacgaggagcggaggggaggagcgggcagctggcctggctagctagcggggtggaggggcgaggccggggccagcttaccctgaaaatccccctcacacgtatccaaaactgcgccactcatgtcacacagctgcaagaacacaatgataggattcggagaaaggaatcaacacgacaaaacatgaacgtcacaaaaaaaaaaaaaaaaagctatgccaatatcacagtcccagacgggccacatcaaaccatgatggattctacactggctcagagacctgaacgtatgggacaaaacaacagtctgctgccaaaaggacattaaaatagggtccgcacagggcgagggacattatgaatcctgaaggtcaggagttcttaaacctgcaagatggaacatgagccactccgcttcttagagccctgggggtgctgtcctcccaggccttctgttgcccacttttgttccccaatttctcctctccttctgctcttttctgcttctccattgatatcttctgctcattctttttttttttttttttttttttttttttgagatggagtctcgctctgttgccaggctggaatgcagtggcacaatctcggctccacctcccaggttcaagcaattctcctacctcagcctcccaagtagctgggactagtggcacgtgccaccatgcccaactaattctcctcggcctcccaaagtgctgggattacaggcgtgagccaccgtgcctggccatcttctgctcattctattgcttatgtattgacactaccttgtgtcccttccctggggtggctggaagagtcaccagatgtgacacactgggaggagcagccctggagacctggctcgggtgaccttcagctcctccgcagctgtgaccttccccgagggcagcaagcctgtgccctcctatcatgggctccttcaggagacacctcagcaccaagacccaccaagatgggcgtggtgctactgcattttccagggagaaatttgcctaatttttaataagcctcggggtagatgacagcagctgtaccttcaacattaatcacatccaaaaataaagaagccgaatcaccagatggctcttccccgtaatatttaaatctgacccagtacaaacacttgcaaattggactagccttttcaaaggcagcacggagctgaaccccacagggtcactgcttccgtctaatcacggaagaaataaatcactcttttggagaaggacgtggagggaaaagtgcattatcacaaaaagtcccagtgcatcctaggacagcactgttctttgaaatgggtgagtgggtgtgtgtgtatgtggtgtgtgtgttccaacccaagctgcctcaccttctgctacttgggacaacactaggtacacatatgctccagctcaccgccatgctactgcactttactaagtgggttggctctagcccaagacacagctcaaccctgtgcctgtctccctgaacaaggaaaatgctcaaatgactttagcagccaccacaaataggcccctgactttataatcttatgtggttgaagtgtctggggagatgttccaaa

SEQ ID NO: 95460 - DNA, 42158 bp, Homo sapiens
attacgatgggaatgattgactatgcttgctactgaacagctggcattatatatgaaactgctatatacaggactgtataaagacagtagaagattttagtaagcctacattaaataggagcagatcttgtggtataaaaaataaccttgtagttctccagatactaagcttgtatatgattatggtgggtgatttcagatatataagcagataagcacagattattgtcctttcaagttaagagtatataatctggacagaaaatttcacaaaattcaataaaattacaactgttgtctaaataagtgaaacacaaattcacttaatagcatcaagatttgaaatacttaagcatgaagtgacttttataatgactcgatccctagacatttgttacagatagttttatgcctaagaccaagatgtaaagtaccatctgcccttaaaaaaaaattggggctgtcaatttctagttttcactcatggttaacacgcatttaaaattatttcatgagtctagtagttctttgatttatagcaggatcttgcttgcctcatttgtttcctggttatgttcttaggattctgactaagaggcaaaagagaaaagactcaagaaactgatcctggagatcgagaccatcctggctaacatggtgaaaccccgtctctactaaacatacaaaaaattagccgggtgtagtggtgggcacctgtagtcctagctactcgagaggctgaggtaggagaatggcgtgaacccgggaggtggagcttgcagtgagcggagatcgcgccactgcactccagcctgggcaacagggcaagactctgtctcaaaaaaaaaaaaaaaaaaaagacggatccttttttttggtgcaaatgggtgacttagtgcattgattcagatttttaaaatttcttgatgtggtttgtaataatcaaatattgacaagaaccttaggtctcgaaagacttttatargtctagatgacgtttgccttaggggtaaagtaaaagaacaattggcaccttaagtttctatacccaaggttatctgtgaaatgagatctcctgatatttgattgctttctcagtatggagtcatatgttgataacagtactgaagatgcataagaaatgcccaagtcactcagaggacaactacccatattccagactctgagctgtttcctttttaaaaatcatatagacaattagctgtttgaagtgagtattaaatatttcagaagtgtgaatttcatgtatttgagctcctctagttgctgtyggtttttcttctgctgccaacctgtgactcacaaatgactaggatctcttgttctttaattttagggtcttgttccaggactcaaatcagtaacttggtgattacaaggtgctgaatgtgttggtaaccatatcgcaatacacctcaaggaaaaggttcagatttttatttttaaaatattttcatttttttcttgaattttatatccgtttgttcactcgtacatgcctagcctacagaaggggatatatattatgaaatggtcatttttctgaagagaatattttgcttgaaatgcaaaggactgaaagagatttgtaggttgttgattttgttasttcatactggaacttttaaaaagatttcatcaaataaagttttgttttctacttttaattatatgaatgtttttaaacctttgttttaggtagaaggtaccattgtgtctttgaagtacatgataatttgtcaattctgctcaactggtacattgtaagaaaccatcttgagccttttataattaatgaaacaatatgcattatgatgactgtaattttagatttctaatttaataggaaatagaaaatttgattcttttattagcttgaaccaaatgaagttgtcatctttgtaggtcaaaaatggttgaatattagcaatttcatacagttcaactgaatatttcagagaagacgtaggtaggaagaaccaagaggaaaggagaaaaatgcaaaataaaataagaaattaaaggatagggagacacctagaaaaacaggatgagttattcagactattgaccataatcaatttttataaaagtcttgatctgttctaagtttggcttccaagtttggctttccagttattaagagcacaatgaggtttgagtttagtgagattatctttcccgcagaagctgtaagcaagagttactgcatacttctcttagaagattagtaaaattcccttgatatttgatttcttggtcagctcttaggaatcctatagatacagtgaaagttcaaatactggctctgcacttacaagctatatcacctatagtgatataggcaagttaaggttaattttttttctgtgcctatttcctcattagtaaagtgggggtaatagtatctactttataaatgaatttcaagaataagctaatacatgtagtgtttagaacagtgctttgtagataggaagtgctatttaagagcttgctattattccaaaagatgtgaattttactattcagagtctttagagagagccctttagatagcatcttaaggagctaattccttttaaatcacatatgcaccccttagttgctgtttcttcaaaagaatatttcatattcaagaatgttgctttatttttttgagacagagtctcgctctattgccaaggctggagtgcagtggtgctctctgcaacctccgcctcccgggttcaagtggttctcctgcttcagcctcccgagtagctgggattacaggcatgcaccaccatgcccggctaatttttgtatttttagtagagactgggtttcaccatgttggccagggtggtctcgagctcccggcctcaagtgatctgcctgcctcggcctcccaaagtgctgggattayaggcgtgagccaccatgcccagcctttgctttggttttaaaagtacttacaatactcaaatgcctatgttggctatttatttttacccagctcacaggcagaaaaaaaaaagtttatttagatcaaattctgcagcaattcctttccctactgctattactgttaaagaactgtgtgccatcattaggccaagttggtgcagcacccaaaatacttgccaacttgtcttctcccagactggaggggctcaggcagctcttctaggatccatcacattctgcatctcaactttaccaataacactcccacccctcctgtaccagcgattcactcaacaaactaaattatacaccattaccaggtcagttcttaaatagctcagcagcaacaagaacaacaagatgttggtcgcattctaattttactggcagaaactgagggtttcattggtgaagaaacctgcctaggatcacagtgtcttagtttctcagggctaccataacaaaacaccacagacagggtggcgtaaacaacagaaatttgttttctcatggttctggaaactagaagtccaggagcaggcaggtttggtttcttctgaggcctgtctccttcacctgcagagggccgccttctcactgtgtcctcacaaggcctttcctctgtgcctatcatccctggagtctctccctgtggcccaatttcctctttctacaaagacaccagtcaaattggatttagggcctatcctaatggcctcgtttcaatttaatcatttttaaacgctgtgtcttcagatagtcacattctgaggtactcaggcttccacagatgaattttggaggacacaattcagaccataacacaaggcaacatatggttcagatgagatctgaatgaatgatcagcctaacctccaagcagattctttcagcagactgcaaggtgcactggagagctttagactagaggcttaagaggtcatttaggcaatatttacagaactgctaagtgccaggattgggggatgtagcagtcacgaaaatcgttcttcgtttcagtaagtttacagtttaccatggggaagagacaaatactgaacaggcagttatattactctcagtaaaataacaactgggaacagtttctggggattactttacatatggaggaaatgcaaaaaacactttgtcaggattattcctgtagcaaattagatgtgactaggtcaaccaaacatggccactgtgaaccatcttattgagcatagaagtggttttgctaaaaatggatttctccacggagcacggtggctcatgtctgtaactccagcactttgggagactgaggcaggaggattgtttgagaccagtttgggcaacaaagcaagaccctgtctcaaaaaaaaaaaaatcagggcgtggtggtgggggcctgtaatctcaactactcgggaggctgaggcaagagcatcacttgagcctgagaggtggaagttgcagtaagctgagactgcactactgcactctagcctgggcgacagagtgagaccctgtcaaaaaaataaaaaataaaaaaataaaaaaaatcaatttcccgtatacttctgttataaagaagtctttaaaaaattgcctgctcccttaagtcagccttttcactgagtttaaatttcgttccaatttgaacaaatatggatgctaatactatcctttatagttactagtgctaagtgcgttgcatgtaacaccttgaatacttactgaagtctgcaaggttggttttatgccctgattactgatggagacacaaattctgaacaactgtgacttcagggatgctaaacaccatagtgaggcacgatgcggggatttgaatcttggcctgagggttccagagctgtggccttttctggggttactctgttaattgatttctagtcctttctgatctacaagccgcggcattataacttttagatgctgaagaaaactaaactatatgtcaaggattaaggcttgtgaacccccaaaatttgggacaggtctcagttaatttagaaagtttattttgccaacgttaaggacgcgcagctgtgacacagccccaggaagtccagatgacatgtgcccaaggtggttggggcacagattggttttatacattttagggagacaggagacatcaatcaacatatgtaagtacactggttccttccagaaaggtggggacaactcggaagcaggaagggcttctaggtcacaggtagatgagagacaaaaggctacatacgagtttctgataagcctttccaaaggagacaatcagaatatgcatctatctcagtgagcagaaggatgactgactagaatgggaggcaggttttgccctgagcagttcccagcttgacttttcccttttgcttagtaattttgggaccctaacattttcacaggctttaaattttattattctttagttactacgtgctagcatataaataaatagtacaaaaccaagaaggcatccaccttttggttgtctcttcacgtgtaaaacaacactttgtgttaagtatcttcacacacggcggcgcaaaggtagaaaccgatactaaaaaagcgtgtagaaaatagctcccagcctgggcaacacagggagacctcatttctacaaaaataattcgccaagcatagtggtgcgcacctgcggtcccagctacttgagaggctgagatgggaaagttgcttgagctcgggcagcaggagttccaggctgcagtgagctaagaatgcgccactggactccagtatgggcgacagcgtgagaccctgtctcaaacaaaaacaaaagcccgttactccaccaagaaggcgcttttgcacattgttttaatgcttaacgccttcaggatgccagcgtgacggaagcaagtaaccaccaaggcatcaccactggcgctaaacttctcacttccggagtgctgcaagcgcagaaaatatacgtcatgtgcggaggcggagcttccgccctgcgcgtcgtattagacggaaaccgagcgggcccatttttcrtgggtttgcggacccaccagcgaaggcgggaggtgtcgcagggacatcttctggctgtttccgtcgcctgcgtggcccttgcaccccggtcttccattagcggcgcagacgtttgggcctaagcgctgggcgaggcgaggccctgcccctccccgccaacggccattctctggaccygtctttcttccgggaggcggtgacagctgctgagacgtgttscagccagagtctctccgctttaatgcgctcccattagtgccgtcccccactggaaaaccgtggcttctgtattatttgccatctttgttgtgtaggagcagggagggcttcctcccggggtcctargyggcggtgcagtccgtcgtagaagaattagagtagaagttgtcggggtccgctcttaggacgcagccgcctcatgggggtccaggggctctggaagctgctggagtgctccgggcggcaggtcagccycgaagcgctggaagggaagatcctggctgttggtatccttaacgccgcgttgggacttggggtgcagggattcggggctggattcctcgcggggctctgccttgggcacagtggcatctgcaggatgatggtcttgggtcggggtcggggtcgctatagaatctctgtcactaggttttctaagtacagtcgtccctcggtatccccggggctttggttccagcccctcctccgtataccacgatgttcaagttccttcaactcccttatataatggcgtggtatttgcatataaactacccacttccgtaatcttttaaatcgtttctagcttacttgtaatgccgaatgcaatgtaagtgatctgtaaatagttgttatactgtattttaaaattttttgtagtttttattggtatgttttatttatttatttttttccatcgcaaatatttttgatccgtggtaggttgattgcggaatcgggtgatgaggcgggccgccctgtctgctttccccagctttgcagtcttagcggcctgtgcatcctggtttgtcactttgtggcagtgctttatgttcctctctgccttagttctctcatctgcaaagtagaggtggtgatagtatctacacacaggattggaatgaggaataaagaaattgcctacatgagagaagtttagcgcgattaatacagtaaatcttaaagttattatcctgtccgggaggtcagtaaggagagaagagtagacttcgacgattagttttgcttgagtcttgccccatttatgtttcttagaggaaggatagtgtggagaggtgttttacccattttttaaattgactttttaaggactattgtttctgtacatgtttggctggttttgtttgtcattggaattaaattcttttttcattagcaaaacgtgatactgcttttgaaatttttatctttttctttgttatgtagtcattttttttttttttttgagtatctattctggctcagaatctggtgataccttacaccaatttcctaaatggggatctatgagtctaggggctcgtgggcttgtggaaagagtcctgtaaatgattgcggggggattggggacgggaaatggagtgcaagagtgtgtgggcgttcagcaaaggaatccctgactgtggagccctaattcttcagtaggtacaaaacttataaataaaacgacattgataagttttaaaacataatgagattatcattttttgcaagtgaataatctttaaataaatctgtaattgatttttggcttaaaagtttttatacagggtactttgaattggggaaagccaaaggatttttgttttgttttgttttgttttttgttttttagagcacatgcgctgttgctgccctcaagctgttgcttagtatcattgcagtctaaagattttctcagaaataaagggtaaaggttagttttcagtgacaagaacccttaaaacttcagcaaagatttagatcattttatgtagcagcccttgtgaagaattactaaagaggactgtggccaggctcagtggcttacgcctgtcatcccagcactttgggaggtcaaggcaggaggatcatttgagcccaggagttcaagaccagcctgggcaacatagtgaacccctgtctacacacagtcaaaaaattagctggacgtggtggcctgcacctttggtcccagctacacggaaggctgaggcaggaagattgcttgggcccaggcggtcaaggctgcaatgagccgtgttcatgtctgtctctgaataaataaataaaaaggactgtgaaagacattctagtcataatgacaacctcatatatttataataaactcgtttatgtcaaaggagtatatctgattacttgttctacaatcggttttgctttatttcattttcacgggaattcagacacctgaaattatttagattttattgtattgtttgttaatgacaaacttacccgttattatactagtttcataatttactcttgtatctctatactaaattgtttggtctttaaaccatctatatagcttagtgtcttatttatacagtctaaatgtctgtgtcaaataatgcagaagtaagttaaacttttgtctcttatakattttaatgtttgtaatatgcgtttaagtgtattagcaagatattaccatctctttaggctatgtatactaatggagatttttaagtcacctaactaaagaactaaagaaacttattttttgtattgaaatgttattggtctttgggtcttataccgaaagtgatttttggctttgctgcagattttaacttttctgtccgcagaaatttaattttgygtatataaacttactgaaattagacaagtcaaattatacaaatattttcagattgtctcatttttcatatttcttgtctaacaatttatgtgaatattttcaggtcgtctaattttacatatttcatctctaagaattcaagccaaaattctcaaccctagctgagaattggcaytacctgtagttaattgaaaaataaaaaataaaagaagwcctacctcagtctctatgatttagaattttaggcccatggggtttaataatccgtatgtttcagaagcttcatatcctattctaatggatagcagggatgagagccactgatctgaaactagatttcctcactgaagttaaagtttaaagtagtgggccaagtagaaactaatttaatcctatgtaatagtgagcttcatggcttttccagactatacttgtagcaagcagaaacatcgatctaatacaagacagatgcacatcaacaccaagttctacctctgagatgtatcttttatccgatctcttctcgtggtctccaccactactgtctgcgttaacttgggctattgtaactcattttagaactggtttccttataatctgttcttcacatgttcatcaaagttatccttaaatcatgttctagaaacttcccagtggccgtatcacctcctgccattccttttgtcctgctgcactggcttcctggagatagggaccgtctctgttttgttcatggctgaattgtttggtgtatatccctagggtcttggatatgcctggcccatggtattgctaaatattatagaaataagcatagcagtagcttgctttccactaggtattttgttacatagtgttttgtaaattaattgttgatggacctacatttttttttatgttagtaaaagttaggcagtgtacattcatttaaatactaaactgttcaacttatttaatagcagatatttattgtgtataagagtccctgtgaaagggagtgcagtgcacaaattgcccgggcaagccatggagcacacaggctgggttttttccctgctagattataaactccatagggccaatactgtgttttgttcagtgcactggatatgccagtgcatagaaaaaatgctgccacataataaaaacagaaataacgtgataggtggccccttcaatgttcttttcctatgttagaaatttacctgcaaatattagcatcagtccaggtttctctctgttttttttttctttttgtttttttttgagacagagtctccctctgttacgcaggctcgagtgcagtggcgtgatcttggctcactgcaaccttcgcctcccaggttcaatcgattctcctgcctcagccttataggcacacgccaccatgcctggctaatttttgtatttttagtagagacaggatttcaccattttggccaggatggtctcgatctcctgacctcaggtggtctgcccgccttggcctcccaaagtgctgggattacaagtgtgagctaccgcactcggcctcaatatattttttaaataggaatgtatacaaggaggakgtcttcatctagactgaggaggggacccctggactgagaccttagagtaggagagaactaggcggagagagggagaaactgtttcaggcagaggaagcagcatgtgagaagaacctggaggcaggaaggagcttagtgatttctgggtttgaggaaagcccagtagcaggaagtgagcagaggccagatcattcaaggcttcctagaccaggagaagaagttttagatwgtatcttgaaggcagtgggaagctttggagggttttcaccaaagatacgttggtgaaatctagtatataccttcaagatacattagaagatagaattgatagacctggtaatagctataggtggtgatgcccagcattctggctcaggtgaatggcagggacattcactgagatgggggcatgagcagctgagtggagaagacatggagttcagttttgatcatgttaagtttgaaatgtctatgaggtatggggtagagacgtcatctgggctctctgttctggggtcaggagcgtgctctgggccagacatatacatggagtcagggcgtggtgtatgtggaggggagtggaggttgatagttcagacaggaggaaagaagagggcctgagaaagatcactgatgaagtgaatactttaacagtgttacaggagctggcaaagagtctgagagcaggaaaaccagcagagcgcggtgtcactctttcttttggacaaatataacattttttgagaagcactttttagaaaagtttaaaaatataagaaaacttcaagatgaaaatataagttatctttagtctcagcagacataatatctactttaatattttggtatgtgaactagttttttatatttaacatatatactgtatcagaaaatggagttatactttatatggttttatagcctgttttactatctttaataatatttaatgactatcttccttatcacacatgctcctgcaacttccatttttaagggctttttggtattccagcaaataggtctgccataattagtttttcttttttgagacggagtcttgctctgtcaccaggctggagtgcagtggcgcgatctcggctcactgcaacctctgcctcctgggttcaagcgattctcctgcctcagcctcctgagtagctgggactacaggtgtgcaccaccatgcccagccaatttttgtatttttagtagagatggggtttcaccatgttggccaggatggtctcgatctcttgatctcgtgatccacctgcctcggcctcccaaagtgctgggattacaggtgtgagccaccgcgcccggcctatgattagttttttaaaaagacctgctggaaaacttttaagttgatttttatattttcattattataaacaagcattctgtaaataactctcattatatatccatgatgattttctgaggatcaatgtctggaagtggtaaaatagactgcaaagttttaaaaagtttttttcactatgaattgtcaaattgtcctccagaaaatttgtgctaattcatgaaaattctttagcaatcacttattttttttttaaagaagcaattctttgcaatgagacttcttaaaaggatatgtctgtctttgtatgattttaaaatgcagtatgtraataggggtaacaagagttcaactaaaagttaactgactttakgtagatcccatgagagcyaaatgtttttcarttttaaatgaatagtgataagtatttagtgttcaacgtttggataatatcagttattaggaaattgaagttgtgaggatgaagagaaaaatcccggagttttttccattaacaattctcccagatattagcatttggttaaaccaagcacttaaaggagtccgggatcgccaygggaactcaatagaaaatcctcatcttctcactttgtttcatcggctctgcaaactcttattttttcgaattcgtcctatttttgtgtttgatggggatgctccactattgaagaaacagactttggtaagtrtcgtatagtttttagtaagtgtcaaataatttttttctttctgcattcttagaaaaattcacataaaatttttgttttctctttagaattttagaaacagacttattttgacacatacttaattacatctacttttttatcttgaacaattaatttttcttttaaaaagttttatgagagttcatcatgggtacaatgataaaatttaacttttaaataaaactaactactaaaaaccttgctgttgagagttttcccttcagaggatcttgttaggtgttttatatttatttcaaggatgcggccatcactcagaacactgtggaaaccctcttttgggaagtgcctccctgaatctgagatcaagtatcctccgtgatagcaagccttcttttaaggggaattggattttaggagtaagcaatgttatgtggtgccaagtggtgactaaagtggattatctaggaaggaaattgaccatgatatagaagagtcagaatgagttgctgctttattgttctggaagtagttttaaaaaatgtttttggaaggccgggggcaggaggattgcttgagcccaagtccagcctgggcaacacagggagaccccatctctaaaaaaatgacataaaataatgtttaaacagtccaaatgacagcacccatttggatatatgacttttatttgttgaaaataccaaagtaatgaaatgatgactttgtaatcataccagatactctctaaatgaggatataggataaaagtaaggatataggataaaaataaaaagcatttataaatgctgggggacctttgttgcctcagtaagagtgtctagtcttgaatgttgcagttttcagttacccaaggcatactgtaaatcaggtactttgtggaaggattagaaaggaaaagagaatatcttggttatttttatccgatattcagccataagcacagggactatccatttgtcactacttgaacatttcttacaagatatttctatacattttagaatttctcatgatatataatcttgaatattgaagggcagaattacatgtaagtaatgcatgtttataaaaagcaatattagaaattgtttttggtgtcactgtgacattttatagaataaataaataatttcttttgggaagcatttaagctttccacttcttgggcatattaaaagacatttaaaagaaactgaaagtaaattaagtttcccaaatatattgtgtagtagcccattaagtaatagatggaaactctgggtgtcctttacgtagcagcaacctgaagatatacactgatatggcaattaggaggaaatgctaaagcagccatagtctgaaaactcagacaaaccaaattctctggaaaataaatcacagcaatgtttctagtggtctaatatcctgaagtgagatcttacatcctttcttctcataggtgaagagaaggcagagaaaggacttagcgtccagtgactccaggaaaacgacagagaagcttctgaaaacatttttgaaaagacaagccatcaaaactgccttcagaagcaaaaggcaagaggaaaattatagtcgtgttagagatgaagttttaaaaaagtgatttttgtcttgatttcctgcgattctctttccctatctaattttgactctcaacagaaaatagagagtgaaatgagacaagtaggctgccatttgacctggtaatttggagttgtggcaattctccgttctgtgagaatcaactttgctaatgagaaaaaaaagctrtcgtgttgcgtcatgtacactttttactttgattatggtcttcttgactctaggtgagcagccccgccamggttccttcctttctctcggctgcatttattttccacagcagtggcctgagagcagccaggtcaggtccctgttcaccatcctgagcagggtctgcataatctgtttaaagatttgtgtactttccagagatgaagcactacccagtcttacccaagttcgaagagaaaacgacctstatgttttgcctcctttacaagaggaagaaaaacacaggtaaatgtttaactatttaagaatattattttagtcattgctacattcagacacatttaaaccttgatgtgttatctacatgataaggcatgtgaacatttcttaatgcatctgaaataggcatgctctatacctttcagaatatttttcaaagactaaattttttatttactatwctttgtgttttggtgattcatgattcttattcctcttcattctaaagaacttctgccagggctgtggattctaaattctccaaggcatgaattttagttttgcttacactttgcttacacatgctgtctctagctgcttttcaatccaatatggtctctctcaccatgatgctaaaataccacaacccatgacattcttgttgctaaatctagcagacgctttgcacgtcttagtgtgctcgacttctctgcactaaacaccatgccacactgccccgctcccccggcatctctctggcgctttctgctcagcctctctgtggactcctcttcctctgtctctctcttaatggttggtggtttctgtgtttgaagtgaaggtggagaaccggaagcttggcagtttgcctttgtcccctgtccttccctccacctcttcctttcccaggagttcccaagagacaacttagcttttgtatcagctcagttctatttgtctccattgctaccactgtcattttttctccaggttacattattagcttttaaacttctttctgtctttgtctttgatcataccctttttgtaatagttcctcccaccaagcccaatctctgttttgtgttatagtctgtttaaaatccaaatctgatattgtcatttccttacttaaaacactttctagcttctccttctcatttttttctttcttttttttttgagatggagtctctgttgcccagactggagtgcagtggcacaatctcagctcactgcaacccctgcctcctgggtttaagcgattctcctgcctcagcctccggagtagctgggattacaggcacgtgccaccacacctggctaattttttgtatttttagtagagacgaggtttcaccatgttgtccaggctggtctcgaactcctgacctcaagtgatccacctgcctcggcctcccaaagtgctgggattgcaggcgtgagccaccacacgcagcttagcttctcatttctttaggataaaactttaactccttaattacactttccagtcttatccctgcctttcttcacatcatccacaggcaggctttcttttccttgtttctatatggtcatacaacttagttcttttgcctggaacactcttctccatgaaccttcccgctccctacaactacactcattaattcgtggctaactccaaccagtgtaattgcaggagatcctggaaagcttttgtgactcctaaattgggtgaggtgactccctattgcatctctagtgacctgcccttcccttgtggtggaagttattagatcccactctaattgcttacttacacgtgtcccccaccagaccatgagaccagtagtggcacagatcttgctgttttattcaccactgtagcccgtataacgagcagagccttgcatacaagtatttttgtaaggggtccttaaaaatcatagatatcgtaaaagtatgtttgactttcagttcagaagaggaagatgaaaaagaatggcaagaaagaatgaatcaaaaacaagcattacaggtatttagatcatttttgaattcagaatgtattctgttatttgaaatgaatgacatgaaaatgaatattaatgaggtatatcaaactgtgaaagttcctgataaaaagtaaagacagatggctttttggttgtgcatatatatgtgtacatgtatgtatttaaaacacactcacctacacacgtgtatatatatatatatatggaatttgccattatgcacatctatatattcaaaacaagctatttttcttttacaaccaaccaaccaatagtaatatgtgcttacatagaaaatatagaaaacatatcattcataaataacttgtaataacagtttgatatattttcatccattctttgcctgccccatatagttgaatatctgtgtgtgtatttgtatatatgtatcaaatgtgcatgtgtacatatatatgtgtacacatatgtgtgtatgttctagttatctgtcgctgtgtaacttagtggttaaaacatcatttgttatcgtcatctgtctgggttccaggggtagatgagctcagacaggcagttctctctggggtctcttgtgtagatgcagccagtctgtagctggggctggagtgattaacgaggcttccttgctgccatgggcggtggttgatgctggctgtcagccagtcttccatgcggccagcaccagagcacctacttgtggcctctccacgtggcctgggcattttcccagcatgatgactgtattcccagtgtgggcatcccaagagaaagttctaagcagaagccctgttgcctttctgacctagctttggaagttgtgcagcatccttcccactacatcctgttcctcagaagctagttactgccctatggaaggggcagagagttagacaagaagaatgtcccacacatattttcatgaataacatttttacaaattgagattatgctgtatatatacatttttttcataaacatttttcaagtttcttagtgtcacagatagcattttttgattcccaaattcactgtttcttgtttgttcatatggttttgttctatcaggtagaaacttttgagctaaaacctcgagatccttcaggttgcggaggtgctgtgctattaatgcagctagtgagagcaatcttagttaagaccatgggcctcgtggtcaaaaagacctgcgtttcagtccaggctccactgttcactagctgtgtgatcttacacagattaaattctccaaggctttatttttttttgtaaaacgaaattgatatcaatgccttcctgatgggggtgatgggagcattagtgagggaaagcacaggaaatgctgagcgcagtgacaggtctgtcctacgtgtttgctggttggtacgtacacatgtaacatacagacatgcaggacatcaggttgtattagcttatcttttttactaatgaaggattttaaagtacttttggtaatgagttaaagttgagaaaagttttacacttttccatgtcttctgtgaatttcttttaatttcatttcttatgttataagcaaaataaaactaacttaattatgggaatgatatatattgcttgaattcctaaggcacattctgtcttgggttcttgcattttctgttctctcagcctgaaatgctctatcctcagtgaggctctttgatatcttccaagtccctgctcacacatcctctttttagtggggtcttctttatctatcaaatagatctttttttccacgttctgttcatgtaatcactctcatatcagataaatctgctttattttaccattatcttgttcatttatttatttatttattgtcttctctcctctgctcctaagagcagggaccttatctggcaccttatccgatctcacagtaccttagcacctagaacagtgcctggtgccttagaggtacctgctaagtatttttttcttttgaatgaattaaagagtgaatggctacattccctaatttgcctactcactttgttgcctgtcacagattatatgcaactgtgtttagccaattgttgattatgtagaactgtgtttattatataaacataatacatatccttaatgttgaatagaactaagtgtatgaaatgtaaatttcatggtgctgtgattttatctttacaggaagagttctttcataatcctcaagcgatagatattgagtctgaggacttcagcagcctgccccctgaagtaaagcatgaaatcttgactgatatgaaagagttcaccaagcgcagaagaacattatttgaagcaatgccagaggtgaaatatgcaacagtacattcatgcttagaattaagaacttcagcaaaactttttattagaaagaagagaaaattgataagcaatacttacacgatatctcagttaacagtamacagcatttctayatctcagattctaagaagcatcgtatatttatacgtttgagcctatagacatttactctaagaagtttttcttgacttttgacccgagactaggtcttttctcctggtctttgttctcacagcaccctgtaatatcacttcatagttcttagttccaaaacacgcttatcttgctcacctctgtattttcagtgtctagctcagtatttttcacatggtatgtgtccagtagatgcttactgactcaattcttaggttaggtcataaaagttattgtaacctataatatacattgtctataaaaactaatagtcatatagaatctaatcacaatggaaaaataagttctaaattgaaattccaggtatatcttcctctgctgcagccctagagatgccattggccctccacattcccttgccctcttcctggacagtgcgaatggggcttcttcaccttggaacatcttgtagcttggcaggcccagaaagctagagtggaggtggtatgtgcagttgggtgctagcaaatgtgtctcctgatcatgctgccattgatacttaattcatgttactattgatgactccctgtcttagttgccagtgagtgagttctttttctctttctgttgctgctacctgttatttctaccgtagttctccattcacccactataggacagaatcgaaattttgcagcatcatcgaccttagtgcatagatggagtgtttttttattttctacaatttttgaatattgcttaaattgatagcagaaatatgaaaaaggaagggtaaatttcttttctcatcactccctgttttttccacaaagaatgtgcagtagcacacactaaggtgcacagaagtgacattcttgggtctttggatatacaaaggacagaagtaaattgatttttatttcaggagaaaaatccaggctcagtctgtctatcaggcattttatttcttgagtatgaaaggatctctggctggcagttgaggaagtagaattttggttgtgtaaacaataacaggaagaaatgggagaaagagagacagtccctaatgatttactgttctttattttctttctgcaaccatgaagtctctggaagtggtggactgtagggtggtgtggagtagcagcttactggatctgtaattttgatagagatgttctaagtcatccatgttgggcctttgtgtgatctgtatgtcgtgcaaatgtaatattgataatagtagtgatggtaggtaataatagcagtagtaataatcataataccatagttccactttactcacggtttgcagttttcagtgacctgtggtaaactgtggtctgaaaatattaaatggaaactttcagaaataaacaattcataagttttaagttgcacaccattctgagtagagtgatgaaatctcacaccctcctgctccatcttgcctggaacgtgaatcctccctttgtctagcatctccgtgctgtagatgcttcctgcctgttaatcactgagtagctgtcgcggtgatcagatcaactgtcgcgatattgcagtgcttctcctcaagtcactcttatttgacttaatgatggcacaayagtgcaagagtatgatgctggcaatttgaatatgccaaagagaagctgtaaagtgcctcctttaaatgaaaaggtgaaagttcttgaattaataaggaaagaaaaaaatcgtattctggctgaggttgcttagatctgcataaaaatgacttttctatctgtgatattgtgaagaagcgaaaagaaattggtgctagttttgctgccgtaccataaactgcaaaagtcatgacctcagcgtgtgataagtgctcagttaggatggaaaagccattacattttggggtggaagacatgaagagaaacatgttctgattgatgacaatcaggtttggtacttctgcagtttcaggcgtcctctgggggtcttggaacataccccaaggatgagggggctgtctactatgttaatagaatcaattrtagtaaattgacatgcttttgatcccagatctaccacttattagccctgtgactctagggaggttacctaacctatttaagtcccaatttcttcatttataaaatggaggtgatatctgtttcataggatgattgtgagaataaaatgaggtattatatgtaaaagcacttagaaaaatgccctccatgggaaatgccttataatgttaagtattactgttaataactgtgattactgtgatttattgtgtcttttatgggataaggttgtgcaggacacttcacttgcatatttacctacattctagaagattgttaagccataatcagatgtcatagtgactgctatgcattacatgctcaatacatgtttattgaataatgattaaatcataaacagtattcatgattttttttttttttttttgagaggaagtctcgctcttgtccctcaggctggagtgcaatggcacaatctcggctcactgcaacctctgcctccccggttcaagtgattctcctgcctcagtctcctgggtagctgggattacaggtgcctgccatcacacccggctaatttttgtatttttagtagagacagggtttcaccacgttggccaggctggtctcgaactcctgacctccggtgatccacccatctcggcctcccaaagtgctaggattacaggcatgagccaccgcacctggccatagtattcatgatttttttttgcccaactctttcgaagattatttttttaaaaggaagctgtagtttttcttgttattcaccttttataatatgaaactaccatcaatgaaaaaagccaattgttctttgttccctgttggggaaagggtggaaatatggtaatattatctgtatttaatataaaacagtaattttgtttgtttattttgcctttaggagtctgatgacttttcacagtaccaactcaaaggcttgcttaaaaagaactatctgaaccagcatatagaacatgtccaaaaggaartgaatcrgcaacattcaggacacatcygaaggcagtatgaagatgaagggggctttctgaaggaggtagagtcaaggagagtggtctctgaagacacttcacattacatcttgataaaaggtatcaggcaccatcatttatatattcacattaaaaaatcaaagatatatcatgactctgaattctataaactagcacccctggataatattaatgaaattctatttatgtaataactgtatactgctattaatggattaactactrtagtgccaaaccactttaaaattagctaatgaattaactcctagttgccgattaaatgaaaatgtatatacttatttatgagaaccagtgttctcttatccatcttactagaagcgtattgtcacactgtaaaactgartggtgagaagtgttttaattcttcttaaggtattcaagctaagacagttgcagaagtggattcagagtctcttccttcttscagcaaaatgcayggcatgtcttttgaygtgaagtcatctccatgtgaaaaactgaagacagagaaagagcctgatgctacccctccttctccaagaactttactagctatgcaagctgccctgctgggaagtagctcagaagaggagctggagagtgaaaatcgaaggcaggcccgtgggaggaacgcacctgctgctgtagacgaaggctccatatcaccccggactctttcagccattaagagagctcttgacgatgacgaagatgtaaaagtgtgtgctggggatgatgtgcagaygggagggccaggagcagaagaaatgcgtataaacagctccaccgagaacagtgatgaaggacttaaagtgagagatggaaaaggaataccgtttactgcaacacttgcgtcatctagtgtgaactctgcagaggagcacgtagccagcactaatgaggggagagagcccacagactcagttccaaaagaacaaatgtcacttgttcaygtggggactgaagcctttccgataagtgatgagtctatgattaaggacagaaaagatcggctgcctctggagagtgcagtggttagacatagtgacgcacctgggctcccgaatggaagggaactgacaccggcatctccaacttstacaaattctgtgtcaaagaatgaaacacatgctgaagtgcttgagcagcagaacgaactttgcccatatgagagtaaattcgattcttctcttctttcaagtgatgatgaaacaaaatgtaaaccgaattctgcttctgaagtcattggccctgtcagtttgcaagaaacaagtagcatagtaagtgtcccttcagaggcagtagataatgtggaaaatgtggtgtcatttaatgctaaagagcatgagaattttctggaaaccatccaagaacagcagaccactgaatctgcaggccaggatttaatttccattccaaaggccgtggaaccaatggaaattgactcggaagaaagtgaatctgatggtacgtgtctgtgcttttgtagaaatctggaacggtaggatttcccctctgtaggaattcagagatcggttagtgtagtcccgttttaactttttacagataaggaacgagagacgtagaaagaaagatgaaatgactttcccagggagtcacagctggtcatggaatcttgaccttccctgtgttgctctgctttttgttatcatttttaaaggcatgaagtgccctatttggggaaggtaaagttgagtttccctctagtttttaaaaactttttattttgaaataattatgaactttaaaaagttggaagaatattataaaacactggttccttcatccagtacctcagtggctagcatgttaccacattagcttagaatttctcttggtctctctgtggccctctatatgtatatcatatatctccaaatctgtatacatatgtataccattgatcctcattatttgtagattccatatttgcaaaattgcctgatcactaaaatttatttataactccaaaatcagtactcaccgcaatgtctttgtggtcatttgtggacatttgcagagttggggaaaagcttgagttgccacactgtcccctgctgaggttaagcaaggtgacactctgcctggttcccgtgttctgagagagatgaccagagggtggggacagtaggggattatgcaatggagagagagcaagaagctccggccccaggccagttggaccagatttgaatccctattctggcacctgttagcgtggcagcttcacacaggtcactaatttgtttcttgaactttgtttcttgtttataaaataaatggaatctattaagatggtggttttttaggatttaagataatatatatgaaatgtgttcatatatatgttatatatgcatatgtgtgtatatgcacatagatatgtttaggagcaatgactcggtattggctaatttagtgttcacagagacttcatacgtgatggccactttgaataagagaatcaaccacacacacacacacacacacacacacacacacacacacaatttgttcctggtatctgctagttttcttcattcaaatgttactatttcccttttgtaattaataagtattttgtggaaaaggaatttttggagctatataaatatgctgttcctgaacaaacttccacccacttgttagcatccattgatgtttacctgaataatttgttactacgttggttgccaaatgatggtttttctaactccatcattccttatatattattacttgacatcctcctatgaggaagatcttttccttctccccatttatttttattatttttaatcagtgtagactcctgtattcctatttagtgagttataatccaatactgtcataatttactttgttactcaaattatcacagctttggccattggggctccttctaatggctttcagcagttttttcattatattttgagcttttccttgctttctggccaagctgtttcaggcatatgttgtactttctctgccctggtcctggaaccagccatttcaccagggagctctggttcctttcagtggagcatggggtttagacaccacaagctggatgtgagtgtgcttatggatcctgaggtataactgtctcaggccttttcagcaacagtgccaggaagtatatttatgtatacatatacatgcacacacacatctatatttatttctatgtctatctgtactaaaatccatgagtttatactgacatctgcaattccatggggttcagtctagcctcctgcttctttatagtttccctaacaatgagaaacattgctccccttatcctcaatacatttacatctgcttattctccctggatatgtaaccatctccccctcccactggcctcctccttggccctgctctcttctttgcttcagctgtgtccttggtgccagctcccagtccctgagagccccctcctctgttcygattgtctccttaaacccagctggacaggccttgccagccctctccacctacagggaaggaaggcaaccattaaatatattttaaggagaaggaaagacagtaagacagtaagagaggagagaagggaagtggaagaggaagaactatttcttagtcacagctttattctgtgctgtgtgaatagcataaaaacatactgagcaacttccatgattgtttatatactttgataatcctcctttttgaatttttaaaacaatgtcagttaacttagaacatatttatataaagcgaatatacaaatcttaagagagtttcctactttcaaagacagtgccagtttacctaattgaaaaggcttgttttgaagttacaggcatttgtgattacatttatttattaataacgctactattacatgtattctgttatagtcatatctttcctttttaggatgtagcatttttcaggttcctccagaaagctcttgatgattgcaggatcattttaatgttttgattgtagatgaagtgaccttttaattttggtacaggaagtttcattgaagtgcaaagtgtgattagtgatgaggaacttcaagcagaattmcctgaaacttccaaacctccctcagaacaaggcgaagaggaactggtaggaactagggagggagaagcccctgctgagtccgagagcctmctgagggacaactctgagagggacgacgtggatggtgagccacaggaagctgagaaagatgcggaagattcgctccatgaatggcaagatattaatttggtaataccgtaacattgtgtttcgacttcttgctgaggaagccaggttaagtaggttttgagttttaaggagttggtggatgagtatttagtagctatttgcagtacatcttgtggttgctgatggcttcatttttgtgtaggttactggctgggatagactccgttttccatgtggtttagtgatgaatctctaaagatattacagagtcttggttagacatccagtggagtacttcctaaggagaaagagcttattggtaatttcagtcagactaaatgcaggctttttgtaaacaaaactcatttggattattaatataaatctataaatgaaaaaacattttataggaggagttggaaactctggagagcaacctcttagcacagcagaattcactgaaagctcaaaaacagcagcaagaacggatcgctgctactgtcaccggacagatgttcctggaaagccaggtgggtgcaggcagcttgggtttcctttaccaccttcctcagayccctgggggaatgcactgcatgaagggggtatgcactgtsccccctggtgctcagggcctggtgatgcygttccctgggggtcactgtgtgtccctaactctgcaggaatgaatgcattacatgaagtggtaggcactgctccccctgtgctcagggcctggcggtgcccttccctgggcgtcactgtgtacccctcactctgcaggaactcctgcgcctgttcggcattccctacatccaggctcccatggaagcagaggygcagtgcgcmatcctggacctgactgatcagacttccggaaccatcactgatgacagtgatatctggctgtttggagcgcggcatgtctatagaaacttttttaataaaaacaagtttgtagaatattatcaatatgtggactttcacaatcaattgggtaagacttcagagtctttttgattactttctgacatttaccttcagagtttgtcctaggaagttttctttccaaggaactagtttgatgcattgatggaaattgcaggtctatgcaaatttttatatgagtgatctttggcttatatagaggaataggattttaaacatttgaattaaggaattaaagtcctagtatgtttaggtagttaatcaactgacttagttaaactttgactagttacccgagatctccacagtgaacaaaaggtggtrgagaggggaagcaggccgcgcctgggcctgtattcgggtttctggcactgatcttcttctgttcatccagcaaatatatgtttggtgactcctatatgccagttgttcttaacaagagggaaggaacagagagtaaaatagtaggagaaacagatgataagcagatacataaatcataatttgacagttggtggtaagtgccaaatagaaaaatataacagtaaaggagaggagagagtgaacttcaggcatcgagagtgcaggtgctgtttcagagagttgttgggaaaggctttactcrtgtaacttcaaggcagggacctgcaggaaataggaagcaagcactgtagatagatacctcgggactagtgagtgaaaggggctgaggcagaagcttgtgggctgtgttctagggaagcaaggaggccagtgtgagaggaggagggaggaaatggcaagggttaatcttagagaataggaagaagctgaaacccaccagggtctggtgtgctagggtatgcaggcagattgaatgtggggtgggagaagaatgaagtcgaggaggattccagatactgagcagctggtcgagtggacctgccttcagtaagacaaggagggagcacagtggaggaggagaaacgaagtgttcaggtttggatatgataaattggggatgctcattggatacccagtggaggtgttgagttgatagttgaatatatgtgactgtggttcagagagactcaggctagatagctaactttgggggtcagcgtatagagggtatttaaagctatgagaatggatgaaactttaaaaatattaacagaatgccattgaataaaataatttattttcaaataataagatatttttggtggttggatatagatatagatatacacacgtacatgatttatataataaaatgtttataaatgtcatataagaaatcttgataaaaattaaaaaatattgttactctttaggattggaccggaataagttaataaatttggcttatttgcttggaagtgattataccgaaggaataccaactgtgggttgtgtaaccgccatggaaattctcaatgaattccctgggcatggcctggaacctctcctaaaattctcgtaaggtcttttatttctttaatttggataattgtgtaaatacccaaataagcaaatagaactattatttacagcatgaactgtcatgctgtaacatgtgaacaatggttcactgagaaagcagcagaaagtattggttgttttccattttctagaratgatgaaatcagagtcagttcttagtggtgctgggcttatcctagttcaagggtacaaagccagtcctgtggatttcacaggaatgtagaagttgccttttcatccattgacatacttatagagcagctatgatgtgtcagacactgtgctggccctggggaaaggagagatgagtaaggcataggccataccctcaaggactccccccatatacttggaggtgatggagaagcaaagcaaattgtacttgtctgtgtgtttggtgtcctgagagaggtcagccaggaagcgacttggaaatataatgccaggaatgttacatccagcactcctgtcctgtttctcacyatgtgaatcccgtgacgtgttcagtggtgaagtcttgctccatccagaacccagagtcgtgctatactcggggtacatttatcattttgaagattctgagatggtaggagttatgagtatgtctgggaaagtagttttttctttgtccttgatggcatctttttaaaaaattgaaatatagtcacataccacagagttcaccgatttaaagtgtacagttcattggtttttagtgtattcacaagattgtggtggcatcttttaaccgtcactatgtcgtgagatgctgtttggtggtggctgatttaatgatccttgagtgttctctccagttacatatcctgtgtttgaaagatgctaggatgctctgacctgaagagtcagtgactggaatcactgaaatgaacggcgaaactgttgtagtgatcatggtcttccagtcatagcacactcaccaatgtgttgtattttatactttcttcatttatctttttctgattttcttattgttgatgaaatttatataccgggaatgagttatgaggtagacatacgtcatgataggtaaataacttgaaaacctacaaataactttattatacaaataaagtaaatacatcatagaaaattataaatatgtattaaaaagatgattacagtttacaatttgtttatgtaattttagacttctcttcacacatatatatgcatatacattgcatatatatgtatactcatttgagtgtgtgtatgattttttttataagaatgggatgatgctatatactttttattttacctgtaacccatttggtattagaacaagacctattatcaacgatgatatagatttatatcgtttttaatggctacaggtagtatctttttgcgtctatcagggctagtttaatcaagtgtcttttgttatttctatttttagaaaggtattaacagacattgatttgagtgtccttaatcttcgggttcttatctaatgattattttagaataagtgaaatagtatctgacttttccatttggtttcttgataactattgagagtgaattttttatgttcatagacggtttgtgtttctgatttagtgaatgacctgtttatgctgttccacttttctttgttcagcagtttttgctcgtttgttgcctgctgaatcattttcatatttgagcagtttctgcctttggtcctccagctcgttgatgccagataggagcagccttcgctctgcctggctcaggacatttaggatgaatacagagtaaagagcaggaaggatggtgggaaaccagtaaaatcagaatgtggcctcactttgttttctgttctcctcttctgagggcaccctggctggtgaatcattcttagagtggggctgcattgggcctgcaggttgaattgagctgtagtcacatttggtttggactacacggtgtattcttctcttgagctttaattttcaattggctaccaacatttacctttgggagattttacacaaaattatggattctgttgggggaaaaaggagatctgaaaatactgggcctgaatttctggatagccccaaaatagctggcatggagcaacagcagttcccctcccctaccccaaggccttggactgggcatgaatccttcaatttcatcacagttgcctccactcccccagctcagctgattgacagacaccttcctcctttcatctttatgtgaagtgccaggccctcctgcttgaaggagtaaccatagctttggcttgatgagctcacaagtgcactgattctaactgccagtcatgattacagtttcaaaaacgaaaatctgcaagtaaagtagaggagaattatcggtattctctcagtgcactcctggaaagaatgttgtaaaagtaatgaagaaaaattattttttcctttttgcattttgttgttataatactttgaagaccgcaattagtaatttccaacgctagatggcactcctgcatcggtgaggcggaccctggccctgacagccggtctgagtgggttcctaatgctgcactagcaagcttgtgaagcgggggagcctgagctgcgggcgttttttcaggttccattgagtacatrgattggtgaggattatgttagtaactttgatggcatttattttttcctaattgtgtaaatgtttctggtcagttgtcactgcattacaaactaccttcagccttagtggcttcacacagcagtagtcactgattttgctcatgcctctgaagctcgctcaggcctggtgggggtgtcttgtctctgttccatgtyggctaggacagctcagctgggctaggaccccttaagatggctcgcggggctgatgaggtggcttcggcctcggggcctgggtggacacttggtgagcttggcttcctcgtagcatgttggagccaagagcaggaggtccaggggacaggaagtggcgagggcctcccctaggcctggcacggcttgagtcacactggtcagccatggccgccctgctcaagaggaggccacagggacccccttcgtgatgggaggagggtccaagagtgtgtcgctgtctttatccggccgatttaggcttagaatggaaaacattgaaaaatgaataaaatataaagaagaaaatgaatggctgtgtgctcacgtagaatattgcctagcacacagcgaaataatagttgttagtgttatttattttaagtatctgtttacttttctcatatatgtgttttttccaaaactggaatcatactttaagtagagttctattatctctgtttttgtatatatttatttgttttacatacatatgtatttatatatataaaatgttaaattttaaaaacagatacatgtatctgtttttacagattttttaaacaaatttaacattttcttggcatatttacattttattaaatattcttcgatccattattgtatttgatttgaggtaaataatacagatacattacttccattttactgctgagaaagagacccagagaagttgtaacttctgtggtataattatgagtgtgggctctagaggaagactgtaccaattccagctgtgaaatcttgagccagttacttatttttgagttcagttccctcctctgtgaggtgagggtaacgatagggcatggcttgtgtgatgattgggcatgtgaaatatttaacacagtgccaarcacagaggaagacttccataaatgtttgccatcattatacattgtggctaatagtactaaaattaataaaatattctatatagcatacaatttgagttagaacttgagtttacatgttctaagtttagttcttcatccatagtgtatgaactataatgtctcattgctgtgtaagtaattgtttcctttattttacagagaatggtggcatgaagctcaaaaaaatccaaagataagacctaatcctcatgacaccaaagtgaaaaaaaaattacggacattgcaactcacccctggctttcctaacccagctgttgccgaggcctacctcaaacccgtggtggatgactcgaagggatcctttctgtgggggaaacctgatctcgacaaaattagakaatatcctttgcttyttaaaagagaaggaaacaccttgtcaaatatgtgtttggtttaaaacttatggaagagaaacttggatcatttttttcttatatcccgttaatcccattttcttaatatcccgctctccttttcactctttcttccctctcctcagttgttgttttttgtttgtttgtttgttttaaaggaacagtgtatcmctctgtcacccagcctggagtgcagtggtgcaatcatagctcactgcagccaccacttcctgggctcaaggaatcctcctgcctcagcctcctaagtagcacaagccactgcatctggcccctctccttagttttaaagagggtctttgtttgaataagcagtgataagcattcatagatataaccacatacttaaatattattgattctgaaagaaggaaagatgactaatcttgtcctttttattactggttgtcctttccgtgtatatttaagtaatcatttggatagatgtttcaaaacttgcactagaattaatccaactacgtttgattttttctcttaatgaaataggcaagatatctgaaacttgtttttattccagttaaccttttttcatagtcacaagtctttgatgtcctaaagtgagagctaaatatgttttattttatagaattgaaaagaacatagtgccagatgattatgctggagtcatttattttgttagtactttcttttagcactctaatctttataaataggaaaatcttaggagatacagggaatggaatcaagaatgggttctttggacctttttatttgtcacttgtttaaatatctttcaaaatatttataagtcttaactgcatgcatattttgtcagcggtatttcggctggaacagaacgaagacagatgaatctctgtttcctgtattaaagcaactcgatgcccagcaggtaatcatggtggacccttctcctaagttcaggatgaagggtaggctgtggttgacagctgttaaagaccagttaactcttattttggggcatagagcagacattttgaaattaggataatttagatgagagaatagaagaaaatagaaaaagaaaagttagactttggcttcattttctatgatcactcttagggctgaactttggagtcctttcatattcatttttttctttgaaaaaaccagtctaataactgatttcacactaaggtgtttctgattaaatacattaccccttgggatttactttcattttttaatgaaaggaagtcttcaaagcaattctgatcatttaagtttttataagtactaatatttttaaattctataaacgaatcttgaaaggtagaagttcagtcattattgtgtatcagtaggagaggtttctgtgggaaggagcccttttgtatgacctttagttcctctaggtacctacttcttgctttatctgtgagtatgttctgactcacacaaaacaagctttcgcccacactagaaacaacccacaaaacatacatacaaataaaccacttagcagaaatgagaatgtagcttttgtgataatatatttaaattaaacccattttcattaggcttggataattttgaaaaacatgaacaaaactaagacagcatttctatgagtttctctttgttttttggatgactatctactggaaacattataaaccaaccaaaaaggaaagctatttgtcttagtgtctggtgatttcttaatttcagataaattttgttgtaatatttatctcctttttcattctaaaacttaatgtgtttatttttccaaaattagaaaatgaagaaaatgaattaaaactactcattagttacctcctctaatacagttgttaacatttaggttaaaaaattttcctgcatttatttgtgaccatactaaatgtaacttaatagatctaatcctcccccccaacttattagcatattttcttctatgtattgtgtggttttcttaattccagatgactagattatatttcatgaaagatatttaaataattagttcagtttacttgttagacctttaattttcaagtttgttatagtaatgctgtgatgaacattaggcatatagctttacccatatattttttttttgagacggagtctcactctgtctcccaggctggagtgcagtggtgagaactcggctcactgcaagctccgcctcccgggttcacgccattctcctgcctcagcctcccgagtagctgggactacaggcgcccgccaccacgcctggctaatgttttgtatttttttagtagagacggggtttcaccgtgtaagccagaatggtctcgatctgacctcgtgatccacccaccttggcctcccagagtgctggggttacaggtgtgagccaccatgcccggccaaagaatatcttcttaaaagtgaatttactgaataaaaggcatgaatatttcttacagttgctaatatatactgtgaacttgcctctcaaaggtattgtatgatgataatgtttttaaaagaaagatatagtaggacttagaaacaggccccatgaagtcgtgttgctcctgaggaagatgaaatgtttagctacagaaaaatatttaacgctctttgaatatcttaggaagagatttctcatttgagatgtggactaaagacttagttgacagagatggtacaagtactgctttaggtatgatttagaaagtgaaaattactgtcagtaattcactgggagagaactgggttttgggagataatgaattaatattctctgacatagtaatccaatgtgagtgatcaaggttgagcttgttgatttggtttagaaacttgacttacttgtctgatttattattattattcttttgttatttttttagacacagctccgaattgattccttctttagattagcacaacaggagaaagaagatgctaaacgtattaagagccagagactaaacagagctgtgacatgtatgctaaggaaagagaaagaagcagcagccagcgaaatagaagcagtttctgttgccatggagaaagaatttgagctacttgataaggcaaaacgaaaaacccagaagagaggcataacaaataccttagaagagtcatcaagcctgaaaagaaagaggctttcagattctaaacgaaagaatacatgcggtggatttttgggggagacctgcctctcagaatcatctgatggatcttcaagtgaasatgctgaaagttcatctttaatgaatgtacaaaggagaacagctgygaaagagccaaaaaccagtgcttcagattcgcagaactcagtgaaggaagctcccgtgaagaatggaggtgcgaccaccagcagctctagtgatagtgatgacgatggagggaaagagaagatggtcctcgtgaccgccagatctgtgtttgggaagaaaagaaggaaactaagacgtgcgaggggaagaaaaaggaaaacctaattaaaaaatatgtatcctctataattagtyatgacagccatttgtaatgaatttgtcgcaaagacgtaataaaattaactggtrgcacggtctttgtatttagtgtgtggttcctaaaaacaaatgctaaatctgacatttgttttttaatgttttacttttctagtattttttagctgaatatttcaagtatcattggatattatcttgtattcacaggctttgtcttttcatgttttcattatcttaacaatgtctgatccttcctggtcacatgttaaaaaagcgaaaaagatttctattgatcagcactcactctcaataggctttccctctgacattcagacgtagctgagaagaaatacgtgcatgtttctaattccacaatagtggcagttttacacaactgtttagccctgctgcccacggctttgcattttccctcaggttccacttaaaagcatagcaggagggagcctcactgctggaacatatttcaatatgtttgctgtggttttagcaaacaattaggaaacctaaatggggtgcatcattctacctgtgaacattaagtgtatgggaacctctgtaccgttatgtttggcttttaaaccagacttcacttattagaagctgacttctgtgtaaatggatttggaggctgggggctggagttgaactggtgtaggtgggtcagctttaggagtggcctgcaggggatgattgttgttgacacagtgtttgttcagagtggacaaagaaggttattttaagactgctcctgtggagacgtctcccaagaacaacccccaagctcctatttgcttcgagttaagaatgattggaggagagtactaccaattactttgagcgtgggtcctctgccttcagagctaccttcccaagtctgtgtccttttggcatctttagtatttccatctttcctgactttttccttcagccttcaaattgaaaatcttcaccaatgaaaacaaaatccaaatagataatctccagcagtctttgaacgactcctagatgtgttgttttttaggctctcatttatattgacttggccagccaaacttctccagtacttggactacagcagctgcttttctttgcacactattttttcctaatttcaaatacgtcttctgcatccatcattcttctctagcagctccttctaaagtcaacaatgatttccacataaactcaaatcttttcttcatgcttcttttctctggaggtacttggagcagaacatttttggaggcaaggggaggggaaaattaactttttcgtgtttttctcatttctcagaattacttgtcactgggagttttctgcatatatatttgcaggtagaataattgtcttgctaacaaatttaatttgatgcctttaatagatatttacatttgtttttcactgcgttagctttgggaaaggataagctactgtaacaaaagatgctcatatacagtggtctgaataagctagaacattacttctctcttactcaacagtctggccagtctgagctggtgaagcagttgtgcaccatgaggtcatgcagtcctgtgttcagccaacccctagggtgctatcttgcctgagtggtctatactgggtgattacttcatctgcattgcatcctgccagaaggggaaagaaccaaagtccagggcaagcagaaggggaaatggatggtcaggaccatgagaaacctgttctgtaacactatttatatgagagtttgatattgtatcttctttttctcttaaccctgtgaccaagacataatgcttttacaaggggagaaacacgtttagagacattaaccagttttgccaaattcacccatgtagtaggtaaaacttctcacctgaaccaaaatcttctaactcaaaattccagggtgctattttacctatgaaagaggttgcctgtttaaaataatcagcagctgaacaaattctttattattcacatcaagttggtgtacctagagcttatttaggatgatgaccatcatacgccttttcgattatcttccagctcattaatattttgtttagctttatctatacttgctgttaaacccatatattgagtattttatttcattgattgttatttttcagttttatttgactctttttttttttcaatttgactcatttttatagattccagttccctggtgtacttcttgtcatctgtttttgagtatcttaatcacagttactttaaagtctgtcgaataactccaatatctaagtcacctatgagtttatttctattgtctgtttcttggtatgcatgggtaaattttaactgaatgttggacagtctatgggaaaaattataggtaccctgtaccttcctctagagaggattccagaatgtatttggacaggcagcagaggggaagatcacctcagtgcagccagcgaggacaaagtagattgaaggctagtttgcagttttttctgtaagactccagcttctagtttcacccgtattccaggaaagtcactttccaggagtgccctgatgtttcttcttttgcgcttggatctgcttttgccactgaatgcttcaaaaattagcctcttgccctaaacagcttaatcagtcaattcttcgactgaatagtcagcactaagcgtcaggcttctctctcccttttttctgggatcttgggcccacaaatctgactgtcttggcagccacactcttcttttgtctccacagttctgtgagattgcctgatgctccgctgctatccttacatgcggtcttctctttggcttcctcaggaaacagcaatgcctggaattcttggctgccttgacagctctctgatactttataacagaggcatgtttgtgtggggtgtgtgtgtgtgtttaaaaatctatttttctcattgttaatagaagctgaggtttgctataagctacttacagctggaggcagaagtctgtatgtatttgttaaacagtcatgttggttaagatgcttgattgagggattctgcctcttaagagatctaacagtgaggattgcatgatctttcaaaaaaatccttaaaaaagacaatggtttttattcgtcatttattttgtttttaaaaaagccccaaagaaagagtatcctctgccccaagttaactgcctatgaataatagttcacattgcttaggattttgaactttccagaatgtttttacctataatattcaccccacaaatatatgttgtatgacttttgtatcatttttaaaagacatttatatttttttgagatagggtcttgctctgctacccaggcgggagtttggtggtgtgaccacggctcactgcagcctccatttcctgggctgagtggtcctcctgccttggcctcccaaaggctaaggcaccctgccgatatatacttgttctatagatgatgaaaccaagaaacatactaagtaaatggcttaaaatcacaatctaattataggcaggaataactaaaatcaggcttcccaactcctagccctttccaatacattaaagtgacctcgattcatctgtgtatacattatggacctgtagtcacactcctaagtttaactttccaatattgctttatcttaactctgtaactttctatcagggatctttccagtggcatgggaaatgtgtatgtcctctgagaggcacacatacatgcacttgggcaggtgcacagatggatctatgttcggagcctgcccattcagtctgaataaaaaggaatcatggtagtttgatttctgggtgcagagcaatgctacagacattctagtatggttgttggagtctaaagacagtgttcccatgcagataggtgacatgaaaaatatgtagcgttcatttcctagaatgtcatagccacggagtcttagartaactcttggcatccaagttaaaagctggatcacttcctccaaatagtcttcactcacttccgggagtgggttgtattcacctttagctctgttcacgagacactcgtgggatattcctagccttctgcccccttagttacgggcattgccgtctcactgctgtataaccagaggcgtgggagctgcagctgtcagaatcctaatcccttctgcctggactcgttaccagtggtagcgagtgtgtatagtagtaaactgtgctgcgatgctagcctttcagtcactaccagaggtcccagcagcaaaaacaaaaattgtggatgatacattttaaccttctagaaactcagctaactcctttaggtatgtccaggctttccatttaaatatcagccttaaggcagacatgtctttctttaatggaagagatctaaattgggagcaaaacatgtgaccacttttgctatcgttttagctgtgtagcctcaatgacataatttaaccttggttttcctgatttgcaaactgtagggaaaataatgtcttctaacttgctgaagtatgctgtaaaagaaaatgtggtggctgtaaaatgtgctttgggattctcggaagaaaggagtgctatattaattcatggtactgcaattgttattttaccccagattgagaagtaaaatatcaaatcgttattttctaaagtttgaataactgttaaatttattcagataatctgctctattcaagaggcataaatagtttcttcagttttaaatatatcggctgtgatggtatggactccttaaggtagacgctgctcaaaagattatctggcaatgaggctgtttgacattgcataggtgctaatgatgcattgatggtaacaagtgaactttcaatgttttaatcgcctcttaaattttaggattgcagtcttactagtcaatatgaagatgatgcctttctttgttacaactgaggtagtctctggtgaagaatatgttttctttctgtagtagctttttaaaatttctgactcagaagcttttgttctgattttaatttgttctagatagtgtttagatggtctttcttaagtcacgcttcgttaatatatgatattttaatataattttgtctgctgtatttgaagttaagctttattaagaaactataaaagcactccatacatattttgaattattaccatttgatattttaatgtattatctatctagttttcaagaaataatgaagaaaacatcaatatatcacctaccatcatttcattacttgatggattcagaagctcaagaaggtaagtcattttatgtttatgtagcttaccaattctaagaagacaaataactaatagaatataaagtgtcacctttgtagtattcattaatgtcttaaatggagctgacacttttatcaatggcatattatgtcttggtttatatttgtgagcctgcaaacatcttgaatcatgtttaagtctattactataccatgatcttgatgatatgttaaagatacttttgacagattaaattaaatatatagacttactaagcatgtacagggtttttgatcttcaaataaggaatacatttttttctcaagtgctgtacactaaatgtatgatgtgatttctaagcaaattttatttcagataagaagcttgcaagaaagataaaaatagttttatgtgaaaactataagtttttactggtggttggatgaaaggtgaatttaggctatacagacatctgtagcctgagtttatggttcctctaactatttattagaggcaaatacataatgtaatttgacctctggatgtaaagagattaagtttgaattctactatcagtgtggttatttgaaattgaaccatcatttttatatagtcttaagtatcaagcgtgactttgcatgggttatgtaatataactgtccccattgtcttgagatcaaaagtacagacatacactcttgacagactagaaaaattaccatatttttgtagagcagttgtaatacaaatctaaatatcttgatttcttttgttctctccttatctgcacacactgtagatgttttctgaacactatagttctggtttttctgtttttggccattcc

SEQ ID NO: 95461 - DNA, 22522 bp, Homo sapiens
cttcagggttcacctgaactccaagtcccccaactggcctggtcagaggtcacccaggaagggcagcccagtgtatccacagcagcatgggttttagatcagagatacccaggtttcttactagcagggcgactggacaagtgaactgaatgcctctaggcctcagctttctcttctgtaaaatgggagtagaagggcttctgttgacaggctttgaggatgaaatggagaaatatatctgaaatgtttggcacatggtaggtgcttggtaaaagggagctctggtttttatccccctgtgccaaggagggctgtcatgcagtcaggatccctggatgtcggagagaagccactcctttcttctgcagggttagggacaagaattctctgacttaagcccttctgctcctccggagaatcttggaacaaggccgataggaactgggggtgggaagatgatgtccctccctcccctgacgggatgatgggcctgcccacagcccctgctcataggccctctcctgcccatcttccaccaggtgaagcccgtggtgtcccagttcctacgtgagaagcagctaccgtacaacgaggactcatacctggctcgcttccagctgtttctccgtcgctatgaggaattcatggtgcaggccccacccatcactgagcttgtggggctgtaatgaggccgggccggtgcagccaccctgcccctccctggcctggccctggccctcctgctgctgctggtccagggggtgtggctcagtggctggtggtggacctggagagtggaggcaccggccaggcaggggggcaggggagctcaggcctggggtctgggggccacctgccttgcgtgcttttctgggttttgaggggtgtctgggggaagcggtaatggtggctgtgcattctggtcagtctggacctcagcaacttcatctcaggactaaagagctgggtccttccccctgctccatctgagccttggtagggttaaagggaggtgacagggtgaagagggatcctgtgcaggggccacctgggagatagcagggggcacagagagagcagggtcagctccctcggctgggacctccctggcattgggagagccccacacggccttggctattgcttccttcaggctctgcccaccaaggtgccctctccccggggaccttagggtgagcttgcttttggcaggccttcctcgatcctcagccaaaggaacctgtgcaagacactggctcagcagttccccaggccacagtatcagcaagataaaagtgagtgtgttttgtcgggagggaactccaggggaagtgaggggagaaggttccccagggacagagttagggaaagagtataaatagccagccaggggcggtggctcatgcctgtaatcccagcactttgggaggccaaggcgggtggatcgcgagatcaggagctcgagaccaccctggccaacatggtgaaaccccgtctctactaaaaatacaaaaaattagctggatgtggtggcatacacttgtagtcccagctacttggcaggctgaggcagaagaatcacctgaacccgggaggtggaggttgcagtgagccaagattgcaccattgcattccagcctgggtgacagagcgagactccatctcaaaaaaataaaaaaataaaaaataagactcccgttcaaaaaaaaaaaaaagaataaataactttgaatgtgaccttggctagttcaaacagtttgttctgtgatgtttagaagtgaacctggggatcatctactgggagagagaagaatttgtaggagggggctggggctggagggggtactgggaacagggtccggaggacggatgacctcagagaggaatgggaggagggtggggtgcagatagaagagcctgaagtcagggctgggcagggctgtggaaggatggtctgcagcctgggagtgaggtgggaatataagggaactaccaatgccaggcagaggaagagaccaaggtgctgggggacaccactgagattcagcccacagtgggtagtattgagagagggctgggagctgccccagctgggggctggactgggagggtgctaggaagtgcccaggtggaggctgagggagagacagagaaggaggccagacccattagttgaaaacagggtctctcaccttggcactattgacttttttttttatggagatggagtctcgctctgtcgcccaggctggagtgcagtggcatgatctcagctcactgcaacttctgcctcccaggttcaagcgattctcctgcttcagcctcccgagtagctgggactacaggagcctgccaccatgcctggctaattttttgtattttagtagagacggagtttcaccatgttgcccaagctggtctcgaactcctgagcccaggcaatccacccaccttggcctcccaaagtgctaggattacaggtgtgagccaccatgcccagtcactactgacattttatctggccaattctgtgttgttgggggctgtcctgtgcattgttggatgtttagcagcgtcactggcttctacctactagatgctgggagctcaagttgtgacaatcaaaaatgtctccagacattgctgagttgacccagttgagaacatgcaagtcattctctgagcgtgtaattgccttgtttttcagtgaaggccttggatagagtgaaaggcctcctgaccctgctgatagggagacaaactgccggcaaatgggagcctgggggatgggcagaggggtctggctacaggcacaggcattccctgagccttgttccgttggagagcccctctgtggtgtggccttaggcagctgcacagaggccactggttcttttatgtgcactctccattcatctccaccacaccttcctttaccaaagaccgcagttcctttagacacccttttccatagctacagactctcactagttctgaaacagctccctccaggcttgcggtggtagtggtttccagctgttgctagcctggggtgcttctccattcccttcaccctgctcacacctctgtatacaaactccttcattaaactgtcctcaatcacgccttttgagtgtgccatctgtttcttgctagaaggttgactgatagagtggagttttggatccaggcagccctcttggcacgaggcaggcttggcggctccccagcccactgctttgctatatgttattgctgctccttggaaatgcattagcagcttagaaatggccttgagatctaggggtgtaattaatcaaactgctaattctccatttgagaaacgcagtggcagaaaaggccccagttgcacagtcctggctcatgattaaaaccatccaaatacataaccaatgactcattgttattgatctggacctgactggggtatgggcagcagctgaaggcactggtgccagatctggctgtaccatgggtatcatgggaacaagtcactcgattgctttgaggctccattttctgtttcacttaggatgtgggctgggaatttctgaggcctgagaggtgagggaggtgacaggagtgaatgaagtatatccagatctctgcagagacttaaggtctaatctacagagacatatgggaggtcataatacatatggatgatgataataatagctaatgtttatctagcatttatggaagttgtcttgacctcatcatctgattttaatgtctacaacaaattgccactattcatatttcccccaaatgttacagacagtgaaaaaaagtcctggagagattaaatttctcaatgtcatatagctagtaagtggaggaagagggattcagacccaatgttgtctgactctagaatccatcctccaccaccagatatactgcctctagatggggagccctacagaactttttcgattgtacgaacttccattatgtgctagccagtgtgtgaagccctgggggtataagagctgagactgggtccccatcctcatggagcttatagtgtagtgcaggggtggtcaaactctgtaaaggaccagatagtaaatatctggggctttgcgaaccatatgatctctgttacaactactcaattgtgccatcaaagcacaaatatagccatagacaatatgtaaagaagtaagcatggatgtcttccaataaagttttattcaaactgaagtctgaatttcatgtaatttttacgtgtcacaaaatgttgttttttaccattaaaaatataaaaacaagctgggtgtggtggctcactcctgtaatcctggcactttggaaggccgaggtgggaggatcgctttgagttcaggagttcgagaccagcctgggtgacatggcaaaaccccatctccacaaaaaatgcaaaaatgaaccaggcgtggtggcaggcacctgtggtcccagctactccggaggctgaggcctgaggctcgcttgagccaagccaggaagcagaggttgcagtgagcaccactgcactccagcctgggtgacagagcaggaccctgtctcaaaaaacaaaatcaaaaccaaaaacaaaaaccccaaaacctccaaaaaaacaaaaacagtaaaagccattcttgttggtcatccaaaacatgctggtggacagtatttggcctgcaagctatagtttgcctactcctggtctagtgggacaggcataaaacacagtgacctattagaaagcagacagcatttacttaccagtgggagggaggggaagtgaccagtaagggcacagaggactcctgggatactggccatgttttatttcttgatctgggtggtggttatatggttacaccttgtgatatattgtcaagttgtacactcatgatttgtgcacttttctgtatgttattattgaatttaaaatctcattaaaaacgacaaccagtgtagtaagtcatgatgggataaggtcagatgctgtggaatgagaggcctttaactccttggaacttgggaggggacgggtcagagaaaaggcttctccaaggaagtaatatttgacaagagggcccatggggaaaaggaagaggggttaggcttattgggtcagctgtgactacggatcctgtccttatttttaaaaacattttgatcatagactttttgcattacttttgaccttttaaaacgttgcagtattatatttatcttgattactgagtgttttggagcccccttaaattctgaacccgaggggagtacctcaactctggtcccggctcggctggctgcacgggggtcggacgctctgtccttagtaccatacgtaagccactgccccgccccgcttttcttcacctatgtaatgggaaaggaggtgaggtgggacgagctttccagggtttaatattctccctggcccggcaaagacggggatttgaggggttacatcggcacaacacccggggtcgaagaaggaggctgctgggctccgggaaggagctccctcgccccagacttccgcactctggttatttcccaacgscgggaaggctcgcttggagccggactcgtgattggctaggacgaagtcacgtgggaggattcgcaatcaaatggcaagggcgtytgcgtcatcagtgagcgacgagagcctcccgagaggggcgcggctaagtaaaataagctcctttcttagtggctgtttccttggggagggactgaaacagcgatggggattcgctctcttccaaccctaggcttccgggatttggagggaaggtgaggcctggggagaaatgtattaaatcgcgtataccccggatgctccgaggggcggggcttcgacggtggggcgtagttaagggcgggtctctcttttgggggcgggattctctcgggagtcggggtggagccgcaaggctccgctttcccggagcgcagggggcggggtttggggcggggcctcgcttgtgggcgggcccgggcaggagcgggcttgccctgcggagcagtagctaggaacagatccacttgcaggttgctgytcccagccatggcttcgcgctgctggcgctggtggggctggtcggcgtggcctcggacccggctgcctcccgccgggagcaccccgagtaggagcagggcgcctttggggctggatgggagcgcggggaggcctgcgagcgctgagtaggggtcggagcagagctggggcagggctggagaagggtgagactgaaggggtgtcttcctgctggcgagatcccggtggtgtacgggggtgggcggagatctgtgcgtgagatgtgaggcttctagggttagagacggaggtcaacaaaggtgaaaaggagagactttgagatcyacaggtgtgagacggggtgaatggaggatgatacggaggtctgtggggcgagaggaaagtctgagtcgaaacagggatctgtaggaataagacgggtctatatgggcaatatagcgttttgtggagagagagaggggttagaggagggacaccgtggggagacccacgggggcgagattgggatgatatggaggccgttggaaggatgtgggattctagccgattggatagggaatgaagtgttgttgggcaggccattggcrgtggtgtagtaggttcatgggtgagatgtgggctctggatgaacccacagcctttgggggttcagatgaagtaagagaccctgcaaatgccaaagccttgaggaacaagagaaggaggatgcaggtgagggtgaagcttgggaagttccagcttctgttggatattyaggttggtttgggactggggagagaagttaattttgaccttttccctctcctctgcctggccccaggcttctgccaccatttctccacacaggagaagaccccccakatctgtgtggtgggcagtggcccagctggcttctacacggcccaacacctgctaaaggtaagccacttactcatagtccatcattcacctgctgctccagtcctaagggcaagcctcacycgctttgggttttaagagcactcctggttgccttatggggaaggggctcccagccatctggcctggacacttcccacttgcttcctcacctacacctgaggctcccctcccctccygtcctcagtgtgacaggggtgtaaaacgcacattggtggtgagtggtcagtggcaggtggtcagctttgcctccctggccaagcactccagggggcttatgtagacctgcaaaatgactttgtcctccttcatcttccctcctctctcgtctatcttcactctatcccaaacatcctacatctcgaggctacccacctcctccgctttctgtaactttacctgccttgccatgccctcctcacccatagctccagtcctccgtgccattctgttctttcagcctgccctctgcccctcccccttcccctgtgaaggccaggatctcaaggctttcagtgtctgcctcggcaggaagggccccaagccaaggctacaggttctacttgagactccacatcagactttgggacagagtagagaggggatacccaggttaactgagacgtgagacagttgcctagctttggagaggcttggagtgtccgtggagagacaagagaaaggatgaatatcttaattatacacacacacacagatgcttgaaatgtagggtgaccaactggcctggactgcccaggacaaggggcttcagcgctaagctggaagttcttgggaaactgggatgagttgatcactctgctgaaaagtgacccgtgcatgcttcccaggcaacacgggtgaaagagctaattacaataatgtgggcagcgtgagccgaggcaggtggggtcaatcagaaactgtttcctgggccggaagcccaggtggctcatgtctgtaatcccagcactttgggaggccaaggcaggtggatcacttgaagtcaggagtttgagaccagcctggccaacgtggtgaaaccccatctctactaaaaatagaaaaatcagccacgtgtggtggcacaggtctgtagtcccaggtacttgggaggctgagtcgggaggatcgcttgaacccaggaggtggaggtagcactgagccaagatcaaatcactgtactccagcctgggcgacagagtgagaccctgtctcaaaaaaaaaaaaaaaaaaaaaaagagagacagtgcatttgagctgccttgaagcagaccaagggctttggtgagggcctcccacatgtggggagtcatcctggaatgcaaggccttgggcacgctgccatgtgggagggaggacagcctgggctctgggatggagatcagggagcacatgggggytggagaggccctgaagggctttgtataagggacagtttttttttagctgakcctgacattttggaagggaggagagtaagcyttccaggcagtgttcttttttttttttttttttttttgagatggagtctggctctgtcgcccaggctggagtgcagtggcacagtctcagctcacttcaacctccatctcccaagttcaagcgattctcctgcctcagcctcctgagtaactgggattacaggcgcactccaccacatgcagctaatttttgtatttttggttgagacagggtttcaccatgttgatcaggctggttttgaactcctgacctcaagtgatctgcccacctcggcctcccaaagtcctgggattacaggcgtgagcccccgcgcccggccaggcagtgttcttagcacgactgtattcagctggcagacacgtgcacatgctttccttgtggaatgggatggggaggggctcaggccaggtacaatccttgttctgatccttgggctgatctttgcccacagggagctccaagctactggctgtgctcctaagacaggaccacatgcagcacgtttgggacagtggcccttagcttgagtcaggcactgagcacagcatctcgtagcatcctcatgacaacctgcaaagcaggtgtcgtgcctcttgcttcacaggtaaggatgctagggccaagtgaggttgtccaagcttccaccgtggagcagggatggcactgggatctgagcgaaggcagctccatgtgaggccatccatgttaatccattcagtaatcatttactggacgtaacatgttctgggcgcaggctttactgggaacatgggggtgaacaggacagacgtggtccctgtgctcgaggacctgacattcgaatgtggaggggacaggtggataatttacaaggtattttagggctctgacggctataagcacagagactggggtgcggggagggggtccatgccyagtctggagggagagatgtcccaattgcagtctgaaggacagtagatgtcaggttgggggacaatagcaggagtgtcccaggcacagagaactgcgtgaacaaagaggaagagaatggctctctggggaaagggcaagttctggaaggtgcctgtgtgcagtaaggcgtgaggaggtgagagccgaggctgagaggtaggtaggacccagatcctggggggcttggaagccattgaccaggctctggaggcaggtttcgctgggaggtgtccacagctgcctcctcttcccygatcagagtctcccggggcatcttatcaaaatgcacattcctgggcctaacttggacctaatcaaactctgtggctgggcccaagagtcagcaatgttaaacaccccgaaggattcttgtgcccacagctgtagatggttggcttcactggagagttttcgggctgctgttttccttcaggatgccccctctgcctgcagcgtaggtccaggcagggctggtggccagatrgcagtggggagctgctggggttgtagtgaggaagaggactgggaggatgggggattgatgggatcaggtcgggggtcagggaggagccccaggttccagcttgggctctgagtggatggggtcgagggaacaggagcagaagtggggagcggtttggggcaaggggacttggcttgaaactggrtggatttgagatgtctggggtgggacatccaagggtctcaggtttggagcttggggagatgtctgggcaggagagagagagtagaaagtcatcagcaagttcaggggaatttggggtcgcaggagggagtgggttaaatcctcagggaggagggaggggggccaatcggaagaacctcagagaatgtccttgttagcggggagcagctagagggacaggagggagggaaggaaggaaggaggaaacctggaagatgaggtcagccacgagagataaggggtaagaayatccggcagacttagcgttccggaggtggccctggagaggacatcgtgacccagagtgaaggatctgtcgcaggaaagaatggaagataaggacagagaggttggttgggtgaggtgttgacctctaggccgagcagtttgaactttatgctgtggcactgggccccagcgaagatttttgagcaaggcagtgacatacaacaacagaatagtaatgatagctctcttcttgattgaacactcagagtaggttgcaccccgggctgcctgattactcatttaaccttgagcaggacaccacagggctcttcttttggacagagaagaaactttccccagtgcacagagccagctagtgctrgagctgggactggcatccaaggctacctgtttgactccaagcccagagcgctttgtgggtacaacatcgtggggcttgagggaggtggtttgggtagccccctgtggctggcctgggatggagagaggcaggaggtgggggagggtggacttgggtgcaggcaggggagtrgaggggaaggggggatttgggcaaaggcgaagaggtgggtgggagcctttgttgggggtagggagactgatgggcaggggcttctttgccttgagtcccagtgaagctggaggtgtcatagcggggacctaagataggatggggggctgggygtgtcagctgtgggacccctgactgctttactgctaaccggcctgtggcccagagtctcaccatcctgacctcctggtgctttccagcagccatgagagrgagctgtcatccatcctagtgtgcagagggggagactgagacttggggaggccctgggacttgctgggatcatgtggctggttggtggcagagccataccagacttgcctgctggacccccgaccctgtgcctttcacacggcctctcaaggtgccctgggaaggcggtcatgcagaaccagtgcctgagactgtctttctaagagtgggagcaggcccatttccacctctctttcccgtgaattcccagccgtgccccctccctgtcctgctgctcccctttccccagagcatggtcctgggcactagagctaaggcacctgtgaattcagagggtggccctcaggtcctcagactggctgggacctgagggtcccaagtgtcgaagggttggaggccagggctgtgggttgtgcttgacctgagaagataaagaagccgccctgatataattccagtcgggggaagccacggcctygtcagctggccacatttctccccatctcygagggccggccgtcgtcgtctttttttttttttttttttttttttttgagacagagtcttgctctgtcacccaggctggagtgcaatggcgcgatcttcgctcactgcaacctctgcctcctgggttcaagcggttctcctgcctcagcctcccaagtagctgggattgcaggtgcctaccaccacgctcagctaatytttgtatttttagtagagacagggtttcaccatgttggtcaggctggtctcgaactcctgacctcaggttatccacctgcctcagcctcccaaagtgctgggctgacaggcgcgagccacccaaggagtgagtgctctttttccttgcagagggtggaagccttgtgttctcagcccagggtcctgaactctcctgctctgtctggggaaggggaggacctgggggcgtcccagcctctctctctcgrccccaccagctgccaccctgttccccagcagcacccccaggcccacgtggacatctacgagaaacagcctgtgccctttggcctggtgcgctttggtgtggcgcctgatcaccccgaggtgaaggtgggtgwctctgggcctggaggctgsggtttggagactttggtcaagatgaggagggcagggaggctccctggctggatgacaggacttcatgccrtctgtgcccatgccacccagcttccctcctggggacacagagtggtgagggtggtgcagacttggtccctggagctgccttaccctctaacccctcccattccygggggacctggcagaatgtcatcaacacatttacccagacggcccattctggccgctgtgccttctggggcaacgtggaggtgggcagggaygtgacggtgccggagctgcrggaggcctaccacgctgtggtgctggtgagtgcagctaggccctggcttggggaggcaggggctgcagaaggaggccggtggctcggggtggaaggcagcaggggtgaggccaggatgcaagctgctgagaagctggaaggaggccgctgggagcctggggggctgcccggcctatcagtgctggtgctgaaggctgtgggtctcgggcctgccatctttcatcagagctacggggcagaggaccatcgggccctggaaattcctggtgaggagctgccaggtgtgtgctccgcccgggccttcgtgggctggtacaacgggcttcctgagaaccaggaggtgagtatggggagcacgcccrctgcctcttcctccccgcccctcagcccttggatgccagacctgggggaagagggagctgccatccagtggcgagmtgtgacattgtgctgactgaggcgggaggccagctgtggagggcctcgggggagagctgggtccaggtgggggaggagggaccagagttgtggactttcccggtgtggggaagccccagggcacagtggggaccaggcatgaggcacctgcagactgagatgarctgagtggagygaggcygggggaccctatcaagacctttcccctccagctggagccagacctgagctgtgacacagccgtgattctggggcaggggaacgtggctctggacgtggcccgcatcctactgaccccacctgagcacctggaggtgagtggtagktcagggctggcggggttggaggtggggtcaccctgaggagagagtgcccttgyctgcagggttcaggccttacctctccaagctgggctcagtgcctctgtttccccgtggtgcccaggcagaggctctctgaagggcagtgccatgagcttcctcttctaccattttcccttcactttctgcactccagctaagtggcgtttttctcttactcttcagtaagccacatcccctgcttggatcatccccactcacctcccaccagttaacagttaaagttcatctttgagatcttggctcggttgtcccttcctccaggacttccctgaattggtccactcccccatcgtgcctcctcccatagacctgtctacttctgtttcaccgcatatcatcgccacrgcaattttacacacattgatgagtatttgatgagtatttctctccccagcagatcacaagctctgagagggcctgctccttgtctcttttcctcaccattgaccaccccgcccctccaagctctttgcatgggggtgagcacatggtagaggcccactacatacttgttgaatgaaagtgtgggcctggtgtgctattagttggagccatttgcagagttggcagcaatgctccatctggccaccaggggggagcagtggcgcaattttgagccgccagccytctccaggcccacggtggggacatgaccaaatggagagtcccctttcctcggtcagtgtctgatgactccaaggccctccttttgtgccagagaacggacatcacgaaggcagccctgggtgtactgaggcagagtcgagtgaagacagtgtggctagtgggccggcgtggacccctgcaagtggccttcaccattaaggtgctggggccagagtgggaggagccagggttccaggtggagggggcctctccttaaggggttggggtggggcagagcccctgggagtagctgctgcctgggatggaagaaggggagcagtcagggccccgggggccctgtgcctttggggaggaggcgggtggtggtctctcctgcctgggctggaccctggggtgggctcaggtggactgtgttctgggcctgacctcctcccccattccctgctcccaccttcaaggagcttcgggagatgattcagttaccgggagcyyggcccattttggatcctgtggatttcttgggtctccaggacaagatcaagggtgaggggccctggcctggccccccaactactagggagagggtggcctaggtcagagagggattggggaagggcatgcagggagagggccggggcccagggacagcctggagacattctacgttgctgacagaggtcccccgcccgaggaagcggctgacggaactgctgcttcgaacggccacagagaagccagggccggcggaagctgcccgccaggcatcggcctcccgtgcctggggcctccgctttttccgaagcccccagcaggtgctgccctcaccagatgggcggcgggcagcaggtgtccgcctagcagtcactagactggaggtgagtctcatgtttcycaaagacacccccttcccaggcctctgccacccgcctggtgttgcccacactctccccaacagggtgtcgatgaggccacccgtgcagtgcccacgggagacatggaagacctcccttgtgggctggtgctcagcagcattggrtataagagycgccctgtcgacccaagcgtgccctttgactccaagcttggggtcatccccaatgtggagggccgggttatggatgtgccaggtgagagggtgtgaggaggctgggtgctgaattatggtgagaggccgagaagctggtatctcctggggccatgcgttcattcatctagcaacatgtactgagaagcttctgcagggcaggccctctctaggacccagtgccgccctcctcttggccctgagagaagttccagtctggctaggacatatgtgacatacgtcgggtcattaagtcattcaacaaacgtttactgaggtcttttctgggttaggccctgtgcttagtgctgggattggagattaataaggcagcctgtgtcctcagggagcktccagttttactaagtgcccacatacctatctagtgattaattcacttggtaaacatttaccaagggcctactgaaactgcaggggagcaagcctcagctcctaagcttagggatcccctyatctacagggaaactgaggtgtaagggggtcggcctggtaaaaacagggagagaagaatccagggcagtggaccagcggccacagcaggctcagccgacagtctgccaagaggcgtggggtgtctgtgtgcgtgcacgtgggtgtagattgtgggcacaggatggccagggtggtatccagccacctccctcccttccccttttgttaccccctctcakgcctctactgcagcggctgggtgaagagaggacctacaggtgtcatagccacaaccatgactgacagcttcctcaccggccagatgctgctgcaggacctgaaggctgggttgctcccctctggccccaggcctggctacgcagccatccaggccctgctcagcagccgaggtctgggccccgatgctgaggtcctgggaggtggggtgggtggtccttctctgggcctcactctttgggagggggctgttctgggaggggtgaaggaggaggtgttgacaatctcccctytgcttcaggggtccggccagtctctttctcagactgggagaagctggatgccgaggaggtggcccggggccagggcacggggaagcccagggagaagctggtggatcctcaggagatgctgcgcctcctgggccactgagcccagccccagccccggcccccagcagggaagggatgagtgttgggaggggaagggctgggtccgtctgagtgggactttgcacctctgctgatcccggccggccctggcttggaggcttggctgctcttccagcgtctctcctccctcctggggaaggtcgcccttgcgcgcaaggttttagctttcagcaactgaggtaaccttagggacaggtggaggtgtgggccgatctaaccccttacccatctctctactgctggactgtggagggtcaccaggttgggaacatgctggaaataaaacagctgcaaccaagagccatggttgatgggggactttttttggaagggttggggtcgggggtcaccttctggccgtagctcccctaccatcaccaggtggcgctgcagagacggctccctgctcaggggcctcattggggcttgatggggctcggcagccaggcctggcatagccacccttcctttctccgctcggccctgctgtggctgcgggttgcctgtcttctgtccacactagggctgcccgggaccgggaccgggaccacccctccctggggagccctcagtacaatcaaaacagaaaagaaatgggagcgggggactgagaagcagcttgtcccctgtacctctgggtgccccaggcgagtctagcctggggcccattctttggctctcaaagccttcctgcttccgtttccagtcagacacactggcctttaaaaatagtgcctcagtctccctagggctttgcagtgtccagagagtggtcactcccttttatggcagccctcaagatgctgcctcgctgtataacctgaggggtcctcgaaattggcccaaggtcacacactcgtgagctgcgggctcaaacccaggctccgggcaggctggtgtgtcctccgaggcgcacttgccccgagtgtcaggtctggggacgcggttccggagaggggagaggggcccgggaatgcggcgggaggggcctcgaggggcagcgggccgggccgggccggggcggaggtggcgggccccggcggggcgggccctcgcgggcggcggtgagagctcccgcacagtcggctgcgagctctgggagcaggaggcgcggtgcgcagcccagcccgggacggagccgggcgccgtgcgagcctcgggagggttcgcggggcgcacgggcgggcccgggcccagcggaccagcccctgccacccccccccccccccgccccgccgcgcccgggctccggcgcccgcggagctgagactgagcgcgccagccctccggggccgaggctctgggacagacaccgcgagggaggcggccggcgcgggctctcgtcgcgggcgcagcgccccttcccctcggtaagtggcgagcggcgggcgaggggcaccaacttcgccgccaacttggggctgggttcccgcggcgcgcgagcaaggacggcggagacagaggcgggacacccggggggttggacccacgcaggactctcggggctcaagragggggcggctggaggacccggaccctcaagaacctggccttgggttttgacccgggcggccggagagaaggcgaagaagaggccgagcagacaggcgcgcggcggacgcgagagaaggacgcgggcgaagcgtccaagacgttcgtccccagggtcgccgagccctcctcctccttcgcttggcgcggcagcaccgcgggaccaggggagtctgggctgccgcggacccaaactgttgctgctggaagccgccggggcggagagcggggaacagggccgggagtgggggccggggctgggatccaccagagcgaggggttggaaaggagtcgagaaggtgaaagggggctgtgcggctccccagcccagtgccccagtttccctaggtctgctgggcacctgctgcgcactcgcctcggcgcccagaccccttcccccgccgcgagtcccgcttcttccccttccagctctgccccatctcctttgccccagcctagctctctccttcctgcgacctgggagaatcggagtgggcttccagagtagtggcatcttgcagatgctggcccgtgcccggctcccgggcttccagagcgcaaagggaagggtaggcagagagggcactgggcgagcaagacctggcgctgggccctggctgcgcaccagccgcctgcgccggtctctgggggcttcgcccaggatccccgacggcggggaggggaagccccgagtctcctgtttcctgcctacgcgggcagggcggggacacgcggagcaaaggcacccggcaacctgaacccccaggtgcgtcccgcgaccctgcaaggagctgctgggtgagcaagacgggaattcccgccaggccctgatgcccaccccattcgtccactcggtttcccagccctggtcgtccaaggggacttctggctcggtcccccagccctcggatggtggcgttatcttagttcagtccctgaccccgggccacaggaaaatcgaggaaagacacttatttggggagggtaccattccgctggctgtatttcagagcccgtccaggtcttggcggtgctagtgactttgagcctgtttctaaactcccgaagaataagagcgtgccaggggcaggtaggcaggtccgggacacctgggttcgcccagggcccccgggcgggcctgggatggtaytggggccgcctgccaggctggcttggtccccccactgcgggactcggggtcacgacccagcttgggggagtgggggtgggggccccggagccgcggacgccggcggggggcagcgtggggcggggggcgccgggtgcgtggtgctcagcttggccgccaggaggcgtggcgcgggtccccgcccggagccgccgccgccgccgccgccgccgcatcgcgagtgtccttgagccgcgggtgacggtggctctcgctgctcgcgccccctcctcccgcggggggagcctgatgccacgttccctatgaattatttatcgccggcctaaaaataccccgaacttcacagcccgagtgtaagagattgctgcggaggggagggggcggggcgtcccggtggccagggggagtccgggcggggtccgcggagacgggggccgtagccttggaggagcaagaactccgtgcccccagcagtggggcaagctagaacggcggtcctctcccctggcgcctgggttcgggttttggctgggcaaaagggagggagggaaacccgacggcaaaggaggggcggctcaccggaagggcagggggtccgggggttctgctggtgggtggggaggactcctgcgacagagtttcctagcctgggagagggagagccatcggtatctcagatgtgagcgggtatgagtgcgggagtgtgcatgtgtgtgcaggtccgtgccagggggtctggctgagctgtgaggacccgggaaggagaaggcccccagcctgggaaggtgctcagacccttctagatgctgctgtgtcctgcaggactgaccactgccatcctctctggggctctttggggatctctgtgtttgtcaaacattagtttaagggctgtttgtggaaggggtgagaccctgagtgggtgggtgggcagaggtctctgagacaatgtgtctgccctcaaggagcccgcagtccagtgtggggcagggtgttaatgagtgcacacacacctgccgcagggcagaatggaggggtggaggggaccactacacagagctccccacccaggaggggaagccagggcagggggaagaagggcaggtgccccagcctggccgcagtccctgcgcctagagcctgaggcatcaaggcaggtgcctgtgggagagggatttcagctgggccctgaaggagagtagacttctgttgggatgaggacattccagcctggggaatgctggaacgaggcctggagatgagggcagaatggggctgtttggccagcagactggcagagctgtgggttccagggatgggaggacggttggttgcggtcagggtgcagagggctctgtctatgggactaagctgtctggacttcatttgtgggcaccagggtgtagctgtcctgtgtgaggagggagcagtggctggaggaaggcttcagcagtgcagtggggctggcgggggtgggtaggtgggaggtggggagggggaggcaagggaggagattgtggcgggggaaagtggagtttgtccctcctacctctgtagggtggctgggttagacggggtgatgagacagaattcggaagctccttgagtctgccccttgctatttggagcccagggacttacctagttttggcccctggctctggaggtattctgggatccctcccccattttaggccccttgattagaggtacaacctgcctcaamtcccccaccccccgacccccaaccccyaacccagcaggacaccttccctttggagagagtctctggtgtccccagcccatgaggatgtcttcctattggagagagtgggaatgagaacattttcagctattaccagacccttattccttcatgtgaatgagctctaggtccttggctaagaaaaggtcttgactggggagggtggaagcttgaggggagtagggagttggaaagagaaatacatttagaaaaaggaggttggagatgctaatggcagactgcttattctgcccctttgcagttgagggagagcctgggcccttcatccagggtcacactgtccaaagaaataaaatgggagccacaagtacaatttaaaattttctagtaaccacattaaaacaaatagaaacaggtgacgttaattttaatagtatattttctttgactaaacataccccaaatgttattatttcaacatgtaatcaagatacaagtgtttacgagattttttacattctttttccctgttgtcttcaatgtgcagtgtggcatgaaattttacactgatagcaaactccgtttgggtgagagatgtttctggtacccaatagtcgtgtatgactggcggctcctatactgggcagcacagatctagagctcattactgggaggcaggggtagtaggaggtttggggctccccagagggcaaggaacctctaggacctggaggtgtgggcagaggtgagcagacagaggccgtgcaaggggagcgacaagcatgtcagtgtcctttgtggttgagatctgacatccctgattggtggtggcagctgaggcatggcatggcatggctaggatcgatcccttgccagactcaaacatgtctctgggctgtcagttctgtcacttctgtcacttctgtgtcactgtactagggaaccgtacacatgggaagatttcaagggcgccaccatgagagcaatattcccttccttgccaaaactcttgtcttcttggcctgaaattctaccacctggcactttagcttaaggctctgactgtggttaaactacatctctcttgggaatgagaaccctttcagctatgatcagtccctcataccttcctgtgaatgagctctagatgcttagctaagagaagatcttgacggggaggctggggagtttgagggaagtagggagagaaggttggaaagagaaatatatttagaaaaaaggaggttggaggtgctaacagcagcatgctcattctgcagatttgactctaagttcctggagggcagggaccatgtctcacccatagggacattccaccatccagcgcctgctgcagggaaggggctcagcacacacgggccaattgatgtttctacactaaagttggtttagtgggttccctggagggatcctttcagtgccaccctggggagaagaggaactttcctgaatgttcctggtagcctcttgcacttccccgctctctggattccttagagagaactagagatacaagaaggcccatatgtctgtaagacattaggctttggattaaaaaaaaagagagagatagctgggtgtggtggctgacgcctgtaatcccagcactttgggaggccgaggtgggcagatcatgaggtcaggagatcgagaccatcctggctaacacggtgaaaccctatctgtactaaaaaatacaaaaaattagccgggcatggtggtgggcgcctgtagtcccagctacttgggaggccgaggcaggaggatggcatgaacccgggaggtggagcttgcagtgagccgagatcgcaccactgcactccagtctgggtgacagagcaagactctgt

SEQ ID NO: 95462 - DNA, 19825 bp, Homo sapiens
caaaactgcagtcagataggtgcgagggtttgccagaaaaacaccaaggagaggatgaaggttacatgcttgctaaaaactgcttatttatttatttacttattttttgagacggagtcttactctgtcgcccaggctggagttcagtggtgcgatcttggctcacggcaacctccgcctcctgcgttcaaatgattctcttgcctcagtctcccaagtagctgggactacaggcacataccaccacacccggctgtttctattttttccccccgcccgaaacagagtttcattcttgttgcccaggttggagtgcaatggcatgatcttggctcactgcaaactccgcctgctgggttcaagagattctgctgcctcagcctcccaagtagctgggattacaggcgcttgccaccacgcctggctaattttttgtatttttagtagagacagggtttcatcatgttggtcaggctggtcttgaactcctgacctcaggtgatccatctgccttggcctcccaaagttctgggattacaggcgtaaagccaccgcacccagccaatttttgtatttttcgcagagacggggttttgccatgttggccaggctggtctcaaactcctaacctcaagtgatccgcccaccttggccttccaagtgttgggattacaggcatgagccacagctcctggcctaaaaactgcattatttaaatgcaaatccaatctctctccttctgctaggaaatatctctttgctattttcggtaaacccatgaccttttctccaacataaattagtcaaacgccagggtatgttctgctcactccatttcaaccctcctttccctacctggcacctgcccattagctgcaggacacttttcccatatgtcacttagttcctggaactagtcatgttggacacctcctgaacttgatatttttgtccaatctgccctcaaaaggactgggggtgggggtggaggtgtgtgtacaaatttatgtgggccaaacttaataggatgctaatcatttgaacaatataaaaggcaaccatttaaagacttgcatgctaaatgaactcaaaggccttagggcaactatgagacgtgtgatcctataggaataaatttgctataaaggccattattaggacaactgacaaaactgcaatataagctgtagataaaagcatcagtattaaatttcctgagtttgataactgtactgtctgtggttacataaaacagtatccttgttcttgggaaatatatacaaatattaaggggtgaaatctgcaatctattctcaaatagttcagaaataactgtggtgggagaggcaagaggatgggggtagggagggggaaatagagaatgaaggacaatgcaaatatgatttaaaaaaaaaaaaggtcgggcatggtggctcacgcctgtaatcgcagcatttcgggaggccaaggcgggtggatcacgaggtcaggagttcaagaccagcctgaccaacatggtgaaacccccgtctctaccaaaaataaaaaaattagccaggcgtggtggcatgcacctgtaatcccaggtactcaggaggctgaggcaggaaaatcgcttgaacccgggaggtggatgtcgcagtgagctgtgatagcgccattgcactccagcctgggcaacagagggagactctgtcgccaaaaaaaaaaaaaaaaaaaaaaaggtcgggcgcggtggctcatgtctgtaatcccagtactttgggaggctgaggcaggcagatcacaaggtcaggagatcgagatgagaccatcctggctaatatggtgaaaccctgtctctactaaaaatacaaaaaattaactgggtgtggtggtgggcgcctatagtcccagctactcgggaggctgaggcaggagaatgacgtgaacctgggaggtggagcttgcagtgagccgagattgcgccactgcactccagcctgggcaacagagcaagactccgtctcaaaaaaaaaaaaaaaagctgggcatgatggctcatgcctataatcgcagctactcaggaggctgaggcaggaggagcatgtgaggccagacatttgagaccagcctgggcaagataagatagactctgactcttaaaaaaacaacaaaaagatctccccataccccaaatatgacaaaaataacattgaaaattggttaatctgggatatagggagttctctgtgttattcttgctcttttcttgcttattttgaagttttaaattacttcaaaataaagtttttttaattaaaggcattagaaaagatacttaactaaaagagggtaattgaatttttgtatcacaaaggataaatgcttgaggggatggataccccattctccatgatgtgcttatttcacactgcatgcctatatccaaacatctcaggtcgggcgcggaggctcaggcctgtaatcccagcactctgggaggctgaggcaggtggatcacttgaggttaggagttcaagaccagcctggtcaacatggtgaaaccctgtctctactaaaaatacaaaaaattagtcaagcatggtggtgcacgcctgtaatcccagctacttgggaggctgaggcaggagaatcgcttgaacccaggaggctgaggttgcagtgagtcaagattgtgccagtgcactccagcctgagcgaagaaaaaaaaaagaaaaatctcatgtaccccataaatatatacacctactaggtacttacaaaaattaaaaaagaaaaataaataagattaagatcacccatgagttggtaattgttgaagctggatagtggatgcaaggaattcactgtatgtactattcccattacttctgtatgcgtttgaaatattgtttaaaaagggacatttaaaaaaagagagagagagcaattcctctttctactagctgaaacagagttgtttcacagtcacttcattaactagtacagccattacaagctttcttactcagagccaaagctcccagatcagggtgccctggatttagggacagtcccctttacaactgaatgccttcagtgggaccatgccaagccttgtagaaagtggactagacccacttatagtcccaatgccctacaaaccacaaagatgaggcaagtaatgatacacctgacaatgaactagagaatgaattaggtcagctgcaaacatttacagggaagcatgaggccagagtcttaaaagaaatgaggccaagcctttattatttttgtacaactgtgagttcaaaccaaaattaaaactataaataattgaatgtcagagatgtcttgcttcttcagactacagacactcactgctagcacacaaacaaatgtaaaaaaaggatcgtgacaattctggagattcggaaagaactcctgaagttatctgcaaagcggagctacctatcttccttctcacccaggaagctgaacaaagcctaaggaggcttccttaatcatgactccctcagacaagactggtagtttctgctctgtttcataaacctgaaactatacctgcacatgcgcctgatgaaaatgtcaaacaaaattgaaatctgtaaaacaactttaaagattctacttgcattttgaaaatccccaatgcaaacagtgcgcttaccttcttctgccaactccttagtgatgatgagtttcccgtggcggaggtagttgaggataggaccaaagtaggtggggtccctgtcaatcagataggctcctgtctcatcctgccaaccaaacacaagggtatcattgtggacctttgaggagtattttaaacaaaggcagggcaggatttcaccrtctktgtcagcgccccaagacaacaattcattccatcagctaaaaaagactttagtgatggcaaattttgttacacatttgtcacaaactattggtaagaaagctatagctttatgtatcttgtacattaagatcatcttaggtagggtgttacagacagtcatactcatttaggcgtttacttactggctggaatttgcaatctttgcctggacaataattacagtgacaaacattcttctgtagcgtgtttgttattaagaaagggagaaaatgccgtagctgtgtaactgaaatctttgcttgagatggacattctgacttttccactgcctctgaactgcattcctaattccaagaaaacctctgtgtagttggcaatgctcctgagctcaaggccaacatcagtgggagtttgcactgccagctgtaatctcacacaccccagctctgtgcccagaggaagctcggtactgccaggacttggctctgagcagctttaatcctactcatctttacagtaaaaggaacaagaagaaactggcttctattaccacaaggaggatayagagtagataaaaataattcctttataagcaagggttttgaaatctctttaaagttagggcaggataggtttccatcaatctgagatttcttagagaagaggaataaacgaaaacaacaaatgtttacgcaactccagctctgttttgaggtcaccagctgagtgctatatgggatataagatggtgtgagttatggtcagtgcctttaagttgagaacttaaaggtgaatacgtaaagttaaaaagaaattgacacagttcaaactggaaatggtttaagtgtcttgtcacctctcaaccctttggttagcagccatgcatcctgcccaaaattttcccgggaaaattttcattttccttctgtcttagcctagatttgcagcggcaaacagtaacctctttccaaaaaacgcatttgatctaaatatggacctaaaccagtgactgttaacagataaaagttctgcgaccaggactataggaaagcagtgtgatatcacaaggagcgcttcctgcagctgtggaagcccaacttggcagaggggtccgagagggagtctgagaaagctacaaggatgcctgagctaaccctgacccagttctggatgcatctggcaccggcagtggggggactgaagaggagccagggaaaactcatgcagatctcagtgggatgtcaggggcagagaatatggagaaggggtgtggagtgcgttctcgtgggtgcaggtgggcgcagtgtgggaaggagtctcagagaacgaagggcggggtcggggagaaagccagagtatgcctcagcatggaagaaggggagtgggaggtccctctgaggcccctgcgagtagtgtgggagggagggggaggatggggtcccggcctgagggggctgcctgtgaggagcgtgtctcaggactctggggaccgatctacgagaaaccagggggttcgaaggcccgggggcgcgcccgagggcggggcacaccttgtctgagtccagctccgggtcctcctggcagcagaggcggcagagaaatgacttgggctcccggcctaaggtctgtctggtggtcacgaagtaggtgcctcccacgttcagcctgacccagcgggccgcgccgccgccccctgcccgctcgggtggtccgggacccggctccagcggctgcgcgacggcggcagccgggcggccgtgcccgcggggcgtggggccagccgggcgtgggctggggggcccgcggactgggccacccccgtcgcccaccccactcccgccgccccctcccagccccgccatcgccgggtccagctgcagttccgccatcttggaccgccgccgccaccgctgctgcccgcgcgcagccgggccggcccatttctcggcagggagagccgggccggcccatcggcgggggtggggcagaggggagagggacgggagcgcccccaaccagcgcccggggacccgcgcgggggaggcgctgtgcccgcccccgggaagatacttccggaaccagccctcatctctattggctgatctgcgaagcaaggcccacccccttggctttggggttggctgaggaaagatcttcccgtgacccacttccgttacttgctgcggaggaccgtgggcagccagggtcggtgaaggtgagtggggcttggggcattggatccgatccctggagggctcctctgctctgccctctccaaacctcacgccgacccttgtcacgcccccgtcaaggacgctgggccctcggcttgccccgctggcagagtgtcccttgtgtagctgccgctcctcgccccgcgatcccttcctcagccctccttggcgcgcggggtcaggggggcccggctgtgtcccaggcgccgctgatgtaggcgctgccacaagccktgtctcgtgcagtccgctcccagcgcggcagacttcaatagtttggtggggggactggggaaacattacgcagacagtgttaacytgccgagggacgctcagctggctgcggggctgcgcccttccccttcggcagcttccaggattcgaacgtatagagcgttcagggctcctcgggtgcagagttcggttactcattcaagaaagattcattgagcacctcctatgcgcatgatctgttctaggcgctggggattaagcaatagatttttaagaattaaaaaaaatttcgccgggcgcggtggctcacgcctgtaatcccagaattttaggaggccaaggcgggcgaatcgcgaggtcaggagttcgagaccagcctggccaacgtagtgaaaccccgcctctactaaaaatacaaaaaattagctgggcgtggtggaaggcccctataatcccagctgctcgggaggctgaggcaggagaatcgcttgaacccgggaggcggaggttgcagtgagccgagaccacgccactacactccagcccaggcgacagtgcgagactccgtctcactcacacacacacacaaagttatttgtgacttccattttccactgatgttgcgggaaatcagggaccccaaacagagagaccggctgaaaccatggcagaagaacgtggattgtgaagattttatggacatttattagttccccaaattaatacttttgtaatttcttatgcctgtctttactgcaatctctaaacataaattgtagagatttcatggacacttatcacttccccagtcaatactcttctgatttcctatgcctgtcttgtctttaatctcttaatcctgtcagttgaggatgtatatcgttccaggaccctgtaataattgtgttaactacaaaaattgtacagcatgtgtgtttgagcaatatgaaatgtgggcaccctgaaaaaagaacaggataacagcaattgttcagggaacaagagagaaccttaaactctgaccgccggtgagccgggcagaacagagccatatttctcttccttcaaaagcaaatgggagaaatatcgctgaattctttttctcagcatgggatatccctgagaaagagaatgcgcacctaggggtaggtctctgaactggcccccctggggcgtacctgtctcttatggttgagactgcaggggtgaaataaactccagtctcccatagcgatcccaggcttattaggaaaaggaaattcccacctaataaattttggtcagaccggttgatctsaaaaccctgtctcctgataagatgttatcaatgacaatggtgcccaaaacttcattagcaattttaatttcgctctggtcctgtggtcttgtgatctcaccctgcctccacttgccttgtgatattctattaccctgttaagtacttgatgtctgtcacccacacctattcgtatactccctccccttttgaaactccctaataaaaacttgctggtttttgtggcttgtggggcatcacggatcctaccaacgtgtgatgtctcccccggacgcccagctttaaaatttctctcttttgtactctgtcaagccagtcgacgcttaggaaaatagaaaagaacctatgtgactatcggggcaagttccccgatacactgatgtttgggaaagtctgtaagggtgcttggttccckggtaactttaaaatcacatgccaattgccttaacacctcccctccacaacaggaaacaggctgtcctgagaaagaaaggaaggacaggacaggtgtttgacaactttcttgaagatcctgagaaagactgcttccgcctcccttgcattccactccaagcttatagagatttttgactttgcagtcttttaatatctgaccctgatcttacttaaagaggactattttcctatattctgactttttttttaagtggctgtagtcgttttctgtatttttctcacattttcacatgtgttgaatacctcttaaaatgcaggccgggcgcggtggctcatgcctgtaattccagcactttgcaaggctgaggcgggtggatcacctgaggtctggagtttcagcccatcctggccaacgtggagaaaccctgtctctactaaaaatacaaaaattagctgggtgtggtggtgggtgcctgtaatcccagctactccggaggctgaggcaggagaatcgcttgagcctgggaggtggaggttgcagtgagccaagatgatgccactgcactccascccgggggacagagtgaaactccatctcaaaaaaaaaaaaaaaaaaagtgcacaacgtgtgctggtgctgctagggtataatccgatgtgaataagaaggtgcaggtgtattaccaatctagttggaaggggatagcccttttaagtttgtaaaactctggagcaagttgctgtgcacaatttcatgtgacacttttagcagccctctggggcaagcaggactgataatgcccattgtacacataagtaaattttagcctagagagtgctctatttaaggcttgttgaaacttaggtgtgtgtcagtttctgtctactggagaatcagtgaataaaacacaatctgggtggaaatgtctttattaacttttatgcaataagagtgttatttttagtaatttttccagaggcacatggaggggataaagagagctggggtttgtttttttttttttttttgagacagagtctcactctgtgtccaggctggagtgcaatggcgctatctcagctcactgcaacctccgccgcccaggttcaagtgattgtcctgtctaagcctcttgagtacctgggactacaggtgcatgccatcacgcccggctaatttttgtattttttagtagaggcagggtttcaccctattgctcaggctggtcttgaactcctgacctcaagtgatccacccacctcagcctcccaaagtgctgggattacagaaatgagccactgcgcccggccaagagagctgggcttttaaggctaaataggagttgggagagaatgtatttgtatgccacattgcacactttgaatttgaaaagctacactgkcctttccttttctttttgagacggactcttgctgtgttgcccaggctagggtgcactgatgccatctcagctcattacaacctctgcctcctgggttcaagtgattcttatgcctcagcctctggagtagctgggattatggcgcgggccaccayggctggctaattattgtatttttaatagagatggggttttgccatgttggccatgctggtctcgaactcctgacctcaggtgatccaaccgtcttggcctcccaaagtgctgggattacaggcgtgagcccactgcgcctggccgcacaccttgaattaccttgaatttgaaaagctacactgtctttttttstttttttttgagttggagtcttgctgtgtctcccaggctggagtgcagtgatgcagtctcgactcactgcaacctccacctcctgggttcaagtgattcttgtgaagacttgcatgtttctaagatttaaaggattmtctctaagagctcttattttgttatttatcatttttcccaactgaaaattcacctcataaaaaagccttgtttttatttgacttatttttcaggatcccaaratggctgggcgaaaacttgctctaaaaaccattgactgggtagcttttgcagagatcataccccagaaccaaaaggccattgctagttccctgaaatcctggaatgagaccctcacctccaggtcagtatgtttctgagagggaaccccatacttgccactgaatctagaaacaaaacagtattaaggaattacatatgaattcttgatgcccttatgacaacatataaagaaatccttgcattttcatgatgatcttaggagaggaaagtgtggtgaccctccaggccataggaagaagggataggaaaattaccatgtgaattttctactgcttatgaacaatcctaacttttgcctttccttgtgggcaggttggctgctttacctgagaatccaccagctatcgactgggcttactacaaggccaatgtggccaaggctggcttggtggatgactttgagaagaaggtgagacttcacacctctaaagcactgagcttgtaacatgcctgtgggtagggagcaggaacagggataattacatacacagcatgacagccagatccctaaggaagcttaggaaggatgcgtatggccaaaggccttgtggtcgattgaactgtaaataggtgcaggaatttaggctctgttcattcagcagtagagtgtagccttaatctgggagccagagggctttctgatcagcacaggagttttgacctgctctgtttctgacctgggccrgttcaccccttcttaggcaacctggtggtcccccgctcctgggaggtcaccatattgatgctgaacttggtgaagacacccgatcggcataacgcgctacagcccagaactcttgggctcaagcaatccacstgcctcagccaggcatgcgccaccacgccccagggggctttcaagttaaatgtttgcccacctcctgggttccttttagcttccttcctgtctccctttggaacaaactgactttttttctactcttttcctgtcctttttcttttgagacggagttttgctctgtcacccagggtggagtgcagtggcgcaatctcagcttactgcagcctctgcctcccaagctcaagccatccttctgtcttagcctcctgagtagctgggactacaggtgcatgccaccaccacacctgataaattttcgttttgttttttttttttttttggtagagacaggtttttgtcatattgctcaggctggtctcaaactctgggctcaggcaatccacctctctgctcttcttttttttttttttttgagttggagtctcactctgtcactcaggttggagtgcagtggcgccatctcagctcactgcaacctctttctcccgggctcaagccttcctcccacctcatccccccgagtaactgggaccacagcaccaccatgcctggctaattttttgtatttttggtagagacggggtttcgccatgttgcccagactggtctcgaactcctgagctcaggtgatccaccctccttggcctcccaaagtgctgggagtacaggygtgagccaccatgcccagcctctgctttttttaactgtcccttatagctgtaatttctcatccatctatcctcctctgatatttacacaagtctcaatatccagagttcatttgcwtattcattcaaagatgtgtatggagggcctactctgtgccaggtagtgttaagtgctggagccataacactaagcagtcttttttttttttttttgagacggagtcttgctctgtcgcccaggctggagtgcagtggggccatctcagctcactgcaatctccgcctcccaggttcaagcagttctcttgcctcagcctcccatgtagctgggactacaggtgctggccaccttgcacagctaatttttgtatttttagtagagacggggtttcaccatgttggtcaggctggtctcgaactcccgaccttaggtgatccgcccgcctcagcctcccaaagtgctgggattacaggcatgagccaccgcacccggctaacactaagcagtcttctaaggagaccattcattacgcagtgctccttccaccagtcagctccctagggttccatgcagaagagaaatcagaatttcttyacaattcaaggtgctaagaggccattttttggtcatcaagtccagctgtccttttcagatgaagaaaatgaagcttatcatcatraagaattgtccagggttccgagttagtgatagggctgagaagacccttgagctcctgttcccagtctaatattctttctactccagtattgagatgcgtattcgtttccgcttgggacacagaatgtctttcagtatgacctttaaggattcgtagcttccagccctttgagctcctgggtgtattggcgaygactcactgtccttgtgtttgtagtttaatgcgctgaaggttcccgtgcccttgtgtttgtagtttaatgcgctgaaggttcccgtgccagaggataaatatactgcccaggtggatgccgaagaaaaagaagatgtaagtagttgaggctcctgcttattctaaaattctcttgatcttgacagctctctattatagctaagttaagttagagtgaattaaatggaagagttaacagccatatraaggaatgacttgtcaataaatgcaacaacatggacgaatttcaaaataattatgcggagtgaaagaagccaacaagaaaaagaagagtatagcatatgattccatctttgtaagactctagaaaatgtagtttgtctacagtggctgcctggggatggttgagaggggactgctggtttcacaggtggatacctatatcaaaacttatcaaatggtgttctttaaatatgtgcattttatcatatttcagatatacctcaacaaagctgttagaaacaaggarttggaattagaaaaattacccaagtagtattcaaatacctaattatttgcttgaaagcactgaaggccaactatggaactcagtggctccaccaragagaagtctggctaggtgctcaggtggcgtgtcctgaccattcagtggctgagccctgtgaaaacaggcattctgtaggtcttcggatgaggaacttgcagaagcagccgggtgctgccatcctaagctggttttccatatgggcttctctgtgagtgttaagaaaagctgtggtttgcctgtcagagtgagcrcccccactcagggtaaccacagtttctccatagagcaataggacagcaggagtgggctgggacgactcctaccttagcagctgctggggtagaatgcagcctggtttcagaactgaatttctctttcttcttaaaggtgaaatcttgtgctgagtgggtgtctctctcaaaggccaggattgtagaatatgagaaagaggtaaggatgatgggtagccgttgcctataatatgggttctctctttcatgaccacacatctttcacctggtggcaggaacctgccttggatattctgctttccgtctctgtttacattaactaaacacattccccctctttccagatggagaagatgaagaacttaattccatttgatcagatgaccattgaggacytgaatgaagctttcycagaaaccaaattagacaagaaaaagtatccctattgscctcaccaamcaattgagaatttataaaattgagtccaggaggaagctctggcccttgtattacacattctggayattaaaaataataattatacagttctgggtgtgcttcttctctgtggttgagataattaagcctctcttctgagctggcctcactggcagcggggtttttgtttaaatggaaaggtgagcctcgacaggtttgttgggctggttgtctgacgggctgtgtaggcgccacttactgaggccccaggactgctgaaatggcaacaaataacactaggggctatggcagtgtatttcactgtgatgtagtaaagaattgttatctgctgattctcttcaacttcctctttggtttcaaacccctggttccaagggagtgctcctgcttgtccattagtaagtcacaagaacagctggtccaaatggctaggtgtaacagcagggatttacttctctgtgcttcagcttttgagcacaaaagtggtattagaaaaggaaactttgggctgggcatggtggctcacgcctgtaatcccagcattttgggaggcccaggcgggtggatcacctgaggtcaggagtttgagaccagcctggccaagatggtgaaaccccatctctactaaaaatgcagaaattagccaggcgtggtggtggggcggggggcgcctgtaatcccagctacttgggaggctgaggcatcttggcctcagcttgaggcttgattgaacctgggaggcagaggttgcagtgagccaagatcgtgccattgcactccagcctgagtgacagagcgagactttgcctctaaaaaaaaagggaaacttatgttgcacagttaacttacagctttttgcatttgaacatggaaaattattttattttattattattttttaagatggagtctcactctgtcgcccaggctggagtgcagtgggacgatctcggctcactgcaaccttcacctcatgggttcatgccattctcctgccttagcctcctgagtagctcggactacaggtgcccgccatcacgcccggctaatttgttttatttttagtagagacggggtttcaccatgttagccaggatggtctcgatctcctgacctcgtgatccgcccgcctcagcctcccaaagtgctgggattacaggcgtgggccactgcatccagcctgaacatggagaattattttaacttaatttttaaaatccccactatttactatggttagcagacctgagcaacgtcaggcaatagagatggtttaaagcaaggtagtagatcatagagtaatgcaagtatttaaagaaaaaagtatggtggtagaaagaattgtccttaaagtcagaggacctgttatgcctacaacccaattgctgattttagattgtttactgtcttgagaatttaattttctcatttacaaatatcaggattgtaatgagaattaaatgagataacctgggaagtttctaggtaagaaagtaagcaaaggctgacttgatgtggcttaaatcctgtaggaaaagtctgcatggtctacgcaggggagacttgtgacatttctgccatttcttttttttttttttttttttctgatatggaatcttgctttgtcgcccaggctggagtgcagtggcacgatttctgctcattgcaacctttgcctcccgggttcacaccattctcctgcctcagcctccagagtagctgggagtacaggcgcccgccaccacgccccgctcattttttgtatttttagtagagacggggtttcatcgtgttaggcaggacggtctcgatctcctgacctcgtgatctgcccgccttggcctcccaaagtgctggggtttcaggcgtgagccaccgcacccggcccatttttgcaggcggagtatattggagaagagcaacaatgcctgacaaccctcgagaaatcagcgtagtcttaacataagcagaggagagcctgggtgcatggctcctgattggtaggagtaaggccgggttgaagatgaaaggcagcggaggggcggagtctactccccccaaaactgcttgagtcaacaagaagactgggcagagatgaggagcggtagctgtgcaaggcctttaatgtgcgtaacagaagtaccacacccttcccctgcgagactgcagtcactgaactggcactcagccatcccgctgaggatctgaggatgcagacgacagccaagtgaaagcgcagggatgtgagaaaaaatgcagtttacttggagcatagttagagctcgcgctgttcaaggagagcaccgctgagccccgtgaaggtgttgggatgtgaagggggcaaccccagcattagggggagccctttgggagattccctgtgctaaataacagtgaacaaacaactgggaacaggctcagctaaaggcacgtgggtgggaagggggtacttttattttttatgccctcttggattgttcagcatttttgcgttgtacatgcattaattttacattaaaaaggtaattgggcagggcgcggtggctcacgcctgtaatcacaacacttcgggaggccgaggtgagcggatcactaggtcaggaaattgagaccatcctggctaacacggtgaaaccccgtctatactaaaaatacaaaaaattagccagtgtggtggcgggcgcctgtagccccagcttgtttgtctgctgcagacaaaactccagttccctggccgggcccagtggctcacgcctgtaatctcaacactttgggaggatgaggcaggagaatggcgtgaacccaggaggtggagcttgaagtgagccgagatcacgctactgcactccaccctgggtgacagagcgagactccgtctcagggaagaagaaaaagaaaaaaaaaattagcatttattctcccctatgtccaagtacacttgcacacacatgcatcctgacaccctcttcctccaagcacagagtagtggggtggtgggtgccgtgtgagtgtggacagagcccactagcaggactgaggccacagagttgggcagcacccccactgcccttgaggctagggactggagttttttgtttgtttgtttgtttgtttgttttgagacggctttcgctctgttgcccaggctggagtgcagtggcgcgatcacggctcactgcaacctcggcctcctggattcaagcgattctcctgctgcctccgcctcctgagtagctgggtttacaggcgcgtgccaccacgattggccggctaatttttgtatttttgtatttttagtagagacggggtttcaccatgttggtcaggcgggtctcgaactttgacctcgtgatccgcccgcctcagcctcccaaagtgttgggattacaggcgtgagccattgggcccggccagagactggagttttgtctgctgtttaacttcataacgatagactgaaacataacccgctccgtgtcatttgcttgtgggattgtagcttgtagagcacgtttacgaggcgaatgtttggatgttgaactcgttccaggtaccagctcaagagagacaacaagaaatggggccctacttaccctggctgcataatgacgccataaccggaagcgtcccgggatgcaaagcctgattggacagaagcagctccccagcttcggatcccgggagccgcggtgtggagggattgggaggcgtttctgggtctaaaacaagggagggaagattatagttgcagggattaaaacgttccgaccacgaagggactcgaaccctcaatcttctgatccgaagtcagacgccttatccattaggccacgcggtctccggctgcagctacctcctagagaggccaatttgatggccattaaacgctccggcgtgccgcagcttcactgctcgcaccctggccgcctgttgagcgaagcgctcacccttcctctggccccagccgcccgcctagtcacccccgagcggagcggcacctggactagtctctgagcctccctgggaattgcgaccgcgtggcctaagggatgaggcgtctgacgtcagatcataagattgagggttcctttgtggtcgggctcttttggagcgagcagcccttgcccgaatcccagcatagtttgagggtttgttcttccctccgccctcgtccatccctattcctcccagctatgctccaccggcctctgcgctcgccgagcacttcttctcggtgttacagggcaccgcgggctcctggtccccgcgcgtcgtcaccgcatggagctcttgtgtagcccggtggggacgccgcgcccagccagcggttcatcctgtcgtccccatggcttctcaggcttggagcgcggtgacccacagcagggccgtgtttgggcactatggttgaacgcctatcaaggagcacgtgggtttagcgtcttaccgcgccccagtggcctaatggataaggcactggcctcctaagccagggattgtgggttcgagtcccacctggggtgtcgagaggggctgtgctcgcaaggtttcttttggtgccggcagccagagacctcagaatccaccaccacctgcccgctacctgcttgcctctgccctgtttgcgcccctcgccttctcttgcaggaccctctgtttgcagtcgcggtggtcatttacctctggttctccggggctgccccgccaggtggagctggggtgtcctgggaaccctttgggcaactttattcttacgagtttccccagcttcgaaattgtggggccctacccggacgaaagctgttcattcaagggcttggcaagacccgagcttaccggctttaggcgcttggaggaggtggctcctcctcaacacgttgcacgggagtcgaactagagaccaaggtcgattccagcatccctgagaagggaagagaaaagaaataaaaaattccgtaaaaggaactttcacctctaccccaggtgggactcgaacccacaatccctggcttaggaggccagtgccttatccattaggccactggggcttggggcacgtggccgtgccatcccttcccctcataagcgagtgtccccttttcctagagaaggcctgacagaggcgcgatccatggagtgggtccgtccctgccgcgcgcacttttggtgagcgggcgggaagataccgcggtgcgcagggacctgcccccatccttacttagcgagcaccagcccccagcccccggcactgggacgccccatggagccccgagggtccgcttggwggttgcctggacacccggaccatggggtatgaagactgaggtttggaggagtttccttcctaccgccctgagccttgctgtccgcctctacagaactgataaaaaatccaggaattttaggaaaaagtagcgtaggaagtgaaggagaacagacaagtattaatcatgaatattgaaacataaacactgaaaatcttgcttatcatgagggaatgtacaaccagggggaacaagttcttccagttgtaatagtagaaatatatatatactagatactacaagtatagatagaaaggaaaatcagccaagtagatatttcaccctaattctaacaaagaataagcacattttaaaatgttacacacatttaaaatccattattaaaggctacagaccgggtgcggtggctcacgcctgtaatcccagcatcccagcactttgggagggtgaggtggggggattscttgagcccaggagttcaaaaccagcctgggcaacatagcgagatgcagtctcatttgaaaaaaagaaaaaaaagaaaaaaaattattaaataaaagtctactcacatccgaaggatttaacagaagaagttcagccaagggcagcgtcggttaccattgtgcttctcttgggaccttgccaatctgccccagcatcgcagggcaaaggagacttggggacattcttttctgtttctctccaaaatgtagagtctgcagaaacctgtctcctccccttaatagcagcaagaaggatttaacccacttggctccagtttactgccttgaggatgcccccctttaa

SEQ ID NO: 95463 - DNA, 23160 bp, Homo sapiens
tctctggaaggagtccccttgtctaaggtgacctttcattgaccagatacactaggtcatttcttatcttctgtggtgaagtccccaaaagccagtgggaactcgacccctgctggtgtccaggttttgtcactgtcatgagaaggaattcaaggactagcagaaaaatagtgaaagtactgagatttattgcaaagtgcagagtacacactcaagaaagggaggtgcaggtgttctcaagacagagagctatgccatcgggtttggggtttctatctttatgggtttccttagccaaggggcagaatattcatgaaggttcctggaaaaaggtgaagatttctcagaactgttgctgcccattttttttttttttttttttgagacggagtctcgctctgtcacccaggctggagtgtagtggcgcgatctcgtctcactgcaagctccgcctcccgggttcacgccattctcctgcctcagcctcccgagtagctgggactacaggcgcctgccaccacgcccggctaatgttttgtatttttagtagagacggggtttcaccattcacaggatggtctcgatctcctgaccttgtgatccccccacctccgcctcccaaagtgctgggattacaggcatgagccaccgcgcccagccttgttgccgcccatttttacaccaaatatgggtgttcctgggactgtccaggtgctggtgggtgtatgatttggtatgttaatgagcgtataatgaggtcctaggagaaacctaggtcaaattcagccccagattgggtccagtcgaacttagccagcttggcctatactctgatttttcagggttttatcaacccctagcttatgcatccatttcaaaagttgccttttattagtcatatgaatctgctgcctagaattttcctttttttttttttgagactgagtcttactcttttgcccaggctagagtgcactggcatgatctcggctcactgcaacctccgtctcccagattcaagtgattctcttgcctcgccccactagtagctgggattacgggcacatgccaccatgcccagctaatttttgtatttttagtagagacgaggtttcgctatgttggccaggctggcctcgaacacctgacctcagtttatccaccctcctcggcctcccaaagtgctgggattacaggcatgaaccaccgtccccagcctgcctagaatcttctattctcctgccactgccctgtattattcttgtgtcaacatggggtccagatatctaaattcttgtgagcagtgagtacattgtaagctagttacatgtgttaactgatttaatcctcacaataacattattatactattattagcttcattttttttttttttgagacagggtctcactttgtcacccaggctagagtacaatggcgtgatcacagctcactgcagccctcaactcctaggctcaagcaatccttctgcctcagcctctggagtacctgggaccacaggcatgtgccaccatgcctggctaattttttgaattttttgtagagaagaggtctcactatgttgcccaggctggtcttaaacttctgggctcaagctatccacccaccttggccggctaacttcatttttaacatacgaggagttgaacccacagagtggttccatttgctaaattacagggctagggatttgaactcgggccacctggctttcttacccaaggtagtgagaggctccacctaccttagttctagctgagctggggtgtgtgaagaacacccttgctgcttctccttgtttccagcctgtgtatgaataactacttctcagaatggaaacactcctttctttgatatgctaatacattccttggtcagggcagcaaggcctgagatccactctgtttccttcagacgactgtctgaatctaccctactggctcaaaactttctctcagagggcaatggcttcacctttatttcctagttattgtgggacacctccccagggtacatgagttctgacaacaaacacccactcagatcatcggaaaatccaaaccagtctaaaaatttcagaggcgggattgtctgatttttttctctttacacaataaacttttgaaatgctacaagcaaaaagaattctggaatttgtagatatttagatggtttgagggactggactgttagaggaaccctaatgtgaaggcttttgttaagtggagcaccacatttgtaattcaaacaatcaccccctagccagataaaaataacagcttccatttcctggctcttactgcagactagaaattgcaagggctttacatctgtcatcatctctctctaataacacctttatagaggtataattcacatactgtacttttaaagtatgcaattcagtgttgctttttttttttttttctttggagaaggagtttcgctcttgttgcccaggctggagtgcaatggtgtgatctcggctcactgcaacctccgcctcccaggttaaagccattctcttgcctcagcctcccaagtagctgggattacaggtatgcaccaccatgcccacctaattttgtatttttagtagagatggggtttctccatgttggtcaggctgatctcaaactcccgacctcaggtgatccacccgactcagactcccaaggtgctgggattacaggtgtgagccaccgtgcccggccgggtttgtttttgtttttgtttactgtatattcacaagggtatgaaactgtcaccactaattccagaatgtttccatcacccgaaaaagaaaacccatgccaattagcagtcactcccccattcctctcccctcagcccctggttaaccactaatctattttctgtgtctatttgcctattctggattgttcctataaacggaactgtataatatgtagtcttttgtgcctggcttttttcatttagcatattaccaagtttcatccacgttgtagctttatttcctttttataaccaaatactattctattgtatgaatatgctacattttatctactcatcagtagatggacatttgggttgtttccagttttggggtaccatcatctcttttaatcttcatgccacctctagaagtgtgtattgctgtcttccattgattgactgagtgaactgtggtttctttcttttgttctccttttgtttatacagatggggcctccctgcattgcccatgctggagtgcagtggccatttacaggggcaatcatagtgcactacagcctctaattcctggcatcaagggatccttctgcttcagcctcccgagtagctgggtctacaggcatgtgccaccatgcccagctaatttttgtattgctagtagagatggggtttcaccatgttggccaggctggtctggaactccttaccttgtgatccacccgcctcagcctcccaaagtgctaggattacaggtgtgagccaccacgcccagcctttatttctttattaaaatgtactttaactggctggtcggggtggctcacacctgtaatcccagcactttggaaggccgaagctggtggatcacgaggtcaggagtttaagaccagcttggccaagatggggaaaccccatctctactaaaactacaaaaaaaattagccaggcacagtggtaggcacctgtaatcccaggtactcgagaggctgaggcaggagaatcgcttgaacccgggaggcggaggttgcagtgagccgaaatcgcgccactgcactccagcctgggctacagaatatctaaagaaaaaaaaaaaaagaaaaaagaaaaagaaataaggtacatttgcagaagtataatcactaactctgtcagatgttatcttatgtgtaaaagaggcaaggattagtgtaatttatcctttaaggaatatagtaactcaggcaggagacatgtgggcccatgtgctctattctgttttatcttcaaaactctttccagtcctgtttctcacatcagaaaaggatagaaattctgttctttccaaccccaccacgtcaatcaaatgaaaatgtcctgagccatgaatccagctcctggagtgaagaatctttgtatcaagaaaaattctggcattattttatgttctcagcactcagtggactctaagaggtcacctggtcctttcctcagcccagaggattccggcagaaaagcagtagctcagaggttttactctgcagccctgactggattcaaataccctgtctgtgtgttaataggggcatgacttttggctcagagactttgcgactctctgagcttcagtttggtcaatataaaatggaattagtaacagtatcaaagttaatgtgaggagtgagtgaagcgatgacaagggcccgtcatactgtaaactcaaaccatggcttcctatttccctattcacggtggatggggagatgtctccgtgccaagttgaccccctccccaactccgcacacgctggtccttttcccctaatcatctcccaccgcctccatcccccactatcctttcctgggtaacttcttattcttcagatcttattttattttttgagaatttttattatttatttacttatttatttttgagatggagtctgctctgtcacccaggctggagtgtagtgacacgatctcggctcactgcaacctcagctcccaggttcaggcgattctcctacctcagcctcctgagtagctgggattacaggcgcgcgccaccatgcccggatttttgtatttttagtagagaccaggtttcaccacattggtcaggctggtctcaaattcctgatctcgtgatccgccggcctcagcctcccaaagtgctgggattataggcgtgagccaccgcgattggcctattttaattttttaattttaatttttttgagacagtcttgctctgtcgccctggctgcagtgcagcgtcacgatctcggctcactgcagcctccgcctcccgggttcaagcgattctcgtgcctcagcctactgagtagctgcgattacaggcgcgcgccaccacgcccggctaatttttgtatttttagtaaagacggggtttcaccacgtcggccaggctggtctcgaactcctcacctgaagtgatccacccgcctcggcctctcaaagtgctgggattacaggctcgtgagccactgcgcctggccttcagatcttaaacaccacttccttggtacagcattcagagacacctccatattcctctccccttactaaaggttccttcttacggcaccctgcatttttccttcatgactttatcacagtttgtaattgtctatttattttaattaatctgtctgtgtccataaactgtgagctccgccgggaccttgtttgccctgctctctgctatgtcctcaatatcaacagtggactaggatcacagcaggctttcatcaaatatttatgggaaacagtccagtccattcctgaactcgggttcagaaaaggatagcgacctgtccaaaatcacacaggttagcggcagacttgatcccgagtctcctaactggcaacccaagactctatccccggaactggcaagaatcttcctgaactaccccgataaaattttgagtgccaaagaaagtcccagaaagggagtgagtagagcagtgtggagagtaggaggaaagtgatttgacttggcccctcctctcttgacgttgagcatactgcaaacagacactatacgtggcagggcggctacagagtgaaccagcgacagggtagccattaaaagaggccagggagcggacagaggagtagagggcagtactgcgcagtagactgcacaggcgcagtcgaggagctccgctcctttctcctcagccccgccccgccccatttctgccgaatcacagaagttcaagagcggtcagctgatgctacgctgtgcggtcacgtgacaacgggggcgaagcgcaggcgcaaggagcaagcgcagattgtgggcggctgtgtcagctgacccaaggggccttcgaggtgccttaggccgcttgcsttgctctcagaatcgctgccgccatggctagtcagtctcaggggattcagcagctgctgcaggccgagaagcgggcagccgagaaggtgtccgaggcccgcaaaagtgagtttcagggtggggctgcccggcgtggcgcgagtcgaagaaagaccgctgggcctcaggtggtgggtagattaggcccgaaaaactgcggggtgcgggcgtgcgtatagtcgcggaaggttgtgtgtttcgaagctttgaggagctgaggctctggaaggcttgcggatcgcctggaagccacgatgtgagatggtaaattgggcgtggaaacaataatgggttaccgtccttggggcctggaggcatgtgaaatgggctctccaaacggagctctttgttcttcttctctcccacttaaccgctctggggtggtcagtctcggtgaagggagccagcatccacacarttgcttggtctagaaacctggagtcctgcttgcctcttctccctccctcatttagtcagtcgccaaggcttgcgtatctttcactttttcccccatgtctactaccagcgtcttagtccaggacaccagtttctctaaaggtactgtagttgtctaaatcgttggcgtgtgtgcgtgtgtgtgtttctgatatgtggcaagcgcagtgtgtgtgtgtttctaacatgtggcaagcgcaktgtgtgtgtgtgtgtgtgtgtgtgtgtgtttctgtctaatatgtggcaagcgcagtgcccagtgcatcagttgtctcccctaacgtggcattcagtgtcgcagtgaaggaagcaggtattgggtcagttaattaattgcaggagagatgagggctggagtggagaaatgtaaggttgctaaagaatttaacaggtgagtttaatctagactggggagtggaagaacccgttctggtcccctccagtcaatccattctcctctctgcaatcagtcatccttctaaaatgcaaatatgtgacttcctgctggtaaggaacaaaataaataaataagtgcagatatgatttccctaccgcctttgtagtcagacgtttagttcctgcagaagaaagctcaaattccttaatgaagttggggaggctcttgtgggtcaggcctggtgctttcctccagctatactgaatcgttgtggtccctcagaagcagcatgatgtctttcacctgcaggtttttgcacacgctgtttcttctgacgtgagaagccttttccaattctcctcccctttgttctctgacccttagtcttccatcagacctcaatttaggaaacacttcttcccgggaagcctttcctgactcatgcttgtcccccggactaggcttggagtccctcccaagtgctgatttctgccactgccgtgcaataacctgtttgtttatatggctcagtcactagactaagcttctggagaacagaaactatgtctcatttaactttatgtatccagtttcccgtctggtgagaaagatgcttctatccctattttacagatagtaaaaatgaggctcagagagaaatgatttatccataccctgggaagcaacatagttgggactcagaagcctctttttccatgcaaggcgaagatactgatcttagtaattccttggtgtttctcctagtataggagttattctatctgacatccaactagatttcaagcatgtctcctctacttgtgcagttaggggttgtrtggtacttggaaagctttctttgagggtgttgggaatgagaagaagccttttgttcttgctccggtgactggaaagttctttgttcttcccagaatatttccagtcatgcccttgatagtgtatttccagaatgacttctcacagtttgtgttctgatggctcatcagtaacagaagttgtatctgtcgggagggataggagaatagattggggaagtgcaggaaaaaatgcttggaatatggtaagaataattctgagtgccctagccaggtaggatttatgttttatacctttatcctgtcaagcctggtgcagggttttgtatatgtcaggtagctgtgaattggttttaaaaagtattaatttggctgggcgtggtggctcacgcctgtaatcccagcactttgggaggctgaggtgggtggatcacctgagatcaagagtttgagaccagcctgggcaatatggagaaactccgtgtctactaaaaatacaaaagttagctgggcgtggtggtgtgcgcgtgtagtcccagctacttgggaggctgagacaggagaaacgcttgaacccaggaggcagaggttgcagtgagcggagatctgtcccacagcactccagccttggggacagagggagacgccgtctcaaaaaaaaaaaaaaacaaaaaacaaaccaaagtattagtttatggcttacatacttctcagatttttttttttttttttgagacagagtctcactctgtcactcaggctagagtgcagtggcaccatcttggctcactgcatcctccacctccagagttcgagattttgtgcctcaggctcccaagtagctgggattacaggtgcctaccaccatgcccatctctactaaaaatacaaaaacatataaattaatacataaataaaaaaataaatttttgtatttttagtagagacagtgttttactatgtcggccgggttcttctcaaactctcggcctcccaaagtgctgggattacagatatgagcsactgcgccttgcctgtctcagaattgttaatagttaggaacagagaggtagtcagaagaactgcagtttgaaaatttgcctttcttgatttataattatggttgatttgcccagttaagagttgggaagaggcagtatataaaatgatcccatccagtttttttaatgaaatcattgagttggaccttaaattttttttattattttttattttattttatatattttgtttatttatttttttgagatggattctcgctctgtcgcccccaggcaggagggcagtggcgtgatctcggctcactacaayctctgcctcccaggttcaagcgattcttctgcctcagccgcccgagtagctgggactacaggtgcctgccaccatgcccggctagtttttgtgtttttagtagagacagggtttcaccatagtggccaggttggtctcgaactcctgaccttgtgatctgctcaccttggcctctcaaagtgytgggattacaggcgtgagccagcgcgcccggcgtggaccttaaaattttaaaaaagtttgtgttaatggcatatttcattggagtgaaacaaaacactggctcccatatgtaaggcccaagaaraacaagatttaagagaaatacgattttctgtttaaatatttttgatttttagaggcccctgtcaaaattgaatgttgaagatgtttgccaaaggcagtaaatggtattatcctgagttataaatgcagggagccatgggagttgggaggtgatgtcttgtgaaatcatgcggagctactgcataatgttcaggccatgagtgttatttatagattgttggtttcgaaagtatctttagctttgaaatacagcccattatagctgatgggaagatagcatgtgaaggattggggtacaggtggccgaagcagacagtagtaggccagaaataatactggagtgaatgtggacttgcagaaatagttcttggagttttgagagagagacctgttaattgtttcagactagcatcagggaatgttgatgtcatggggtcatttcattacaggtccaaagttctgttctgaatcaggatgtggaaggttaagttcattttcactcattcgcgtggactctagacagttggtatacaatgatgtacagtgttgtataacaaagcttaattttagatgcaggatgtcttttgctctcaaataaataggttgatggtctagaacctctctttttttttttttattggtgagcggagactcaaagcagagattatatgttggctgtccttgtggtctgttttcatgtagactctgaccaaacctagagattttttccagctgtatgttaagccactcacttctagaaaccaaaatacctgtgtctcctcttctctcagccacttgtgcagtcttactgtccagtactcctcattcagcattccttctcagtcaccactgtccttacttccttgtgacagggactgcttttagtttccagtgttacattatatagttggttcattagttacattatatgttgctgtcccttgcgagcttattagccttcttgctaagcatctgagtagggttgcacctttaatcagcagcatacttaaggtgtttacttctggagaagagttccctagatggttaatgttactcattttatgttggttcttaatagttgagattgagagaatattctgacacattctacaatttttttccatctttttaatgggctgtagttacagaaggtattcatttttgtcttgtcacttcctagttaagtacagcctataggagggaggaacctgtactgtttgttagctctgaattccctctttcccatgcacatctcttcggactgtgtcataatttattcttggcttattgttataatataccatcttgtctctgcttgcttttctacttttaaccacttcctgatatagctctctcctttgaaaacaggaaagaaccggaggctgaagcaggccaaagaagaagctcaggctgaaattgaacagtaccgcctgcagagggagaaagaattcaaggccaaggaagctgcggtggggcaccrtttgtttttgttactgctttagtttctgatcccctgtcccgccaaggctttcagaatatccagcatagctcagagatcctggtcgaagtttgaaaatgtggtagctgtgtgttttattggctgctcaggcatctgtcttttaggatgatcagtttttccattcatattgatttctaattttcatttattcactcatttaacacgtatctgttaagcagttaacatgcgccaggtactgtgctagatgctagggatcagttgtgaccaggaatagacatggtcccttccctcatggagtgtagcttaccatccagtggtcagggagactcagtaatacagtgcaaatcatgcagagctactactgaaaaatgctgtgacggtcataaacataaatcaaatggagccccactttagtatattgtatatagtacagacatttaccagtgatgtaggctatactatggtgcatacaataatagtacaaaaacagatcacagaaagcatagaggaggcagggacaattgtggaaaggggaaaggatggataagggcctcacagagaaaagaaactatcaggactcttgggtgcaggtaacaaaatataattaaaactgattctaaatgggatgtattggcctatataattaaaaacccaagagcttaaataatatgctcaggactttctctcacctctgtgtttggctttgtatcattctcaagttctacactgtggcctctagtagttccagcatacacacttccaggcccaagtccagtgagtaaaggcacatacctccctccttgcattaagtagcaaaaattttgatcaattttttattttttctttttaagagacagagtcacactctatcattcaggctttagtgcagtggtgtgatcatagctcacggtgacctggagcttctaggcttaagcgatcctcccctgcccagccttctgagtagctaggactgtaggcatgatccatcatgctcagctaattttttttttgtttttgtagagatagggtcttgctgtgttgccttggctggtctcgaactcctggcctcaagtgatcctcacatctcaacctcccaaagtgctggatcatctttgttcttggcaattacagtgccattaaaacgtggctgggcatagtgactcacacctgtaatcccaatactttgggaggctgaggtgggaggattgcttgaagccacaagttcaaaaccagcctgggcaataaaccaagaccctgtctctacaaaaaaataagacaaatacaaataaaacttaacatgtttctttgattcttgaactggggctgataggtgctgtaagttgtcaggctgctcataaaacaatgtagaaatacccttgtgtcagggcagccatcatcttcatttttttttttttttttctgagacggggagttttgctcttgttgcccaggctggagtgcaatggcatgatctcggctcactgcaacctctgcctcccaggttctagcgattcttccacctcaacctcccgagtagctgaaattgcaggcatgcgccaccacatccggctaaatttgtatttttagtagagatggggtttctccttgttggtcaggcttgtcttgaactcccgaccgcaggtgatctgcctgccccggcctcccagagtgctaggatgacaggtgtgagccaccgcgcccagcgccccccgcccctttttttttttttttcctgtccgagatgtagtcttgctctgtcacccaggctggagcgcagtggcgtcatctcagttcactacgacctccacctcccaggttcaaatgattctcctgcctcagcctcccaagtagctgagactgcaggtgtgcgccaccatgcccggctaatttttgtatttttagaagagacgggggtttcactgtgttggccaggctggtcttgaactcctgaccttgtgatctgcctaccttggcctcccaaaatgctgggattacaggcgtgagccaccacgcctggcccatcttcatatttttacattcttttttctttttcgtggcacaggcctaggaggtcccaatgacatgtgccctcatattcttacattctgtgctgtagttgattatagagatggtactggtattgcactgtaaagcacaagctctgattccttttttctttcttttcttttctttttttctttttttttttttttttgagacagtttcactcttgttgcccaggctggagtgcaatggcgcgatcttggctcactgcatcccccacctcccaggttcaagtgattctcctgcctcagcctcccaagtagctgggattacaggtgcccaccaccacgcctggcagttttttttttttttgtctttttagtagagacagggtttcaccatgttggccaggctggtcttgaactcctgacctcaggtgatccacctgcctcagcctcccaaagtgcagggattagaggtgtgagctaccatgctcagccaagctctgaatctttctagcagtgttccattgtaacctctttagtttttgagacaacttagcggagcttggcgtatggtttatattcaagaaacaggtaatggggttctgaacataaaagaatgagttagcaactgagctgttaatgaaatgccccaggagattcctgtaatatgaacagttatagtatagtatgaagagccctaagggcacagtggctcatgcctgtaatgctagcattttgggaggccaaggtgggtggatcgtttgagcccaggagttcaagacctgcctgggcaacatggtgaaactctgactctacaaaaaaaatacagaaattagccgggcatggtggtgtatacgtgtagttccagctacttgggaggctcaggttggaggatggcttgagcccaggaggtggagattgcagtgagccgagatcgtaccactgcactccagcctaggcaacagagtgagactccatctcttaagagaaaatggagtgataaagtcaggcacagtggtgcacacctgtggtcccagctctgcaggaggatctcttgagcttggagtctgaggccatcctgggcaacatagtgagatcccatctcttcgggaaaaaaaaatggagtgatagcctccttataggtcgttgtgaggaataggtaatggagagactcctttgcaaattaatatattatgcaaatatgaagggatgttattagcatatatatatatgtatatatagtgaggcaagaacaggttaggtgaataaaaagggtcagacaaaaaagttacgtcttccagaacgttataggttaagttctaataaagaaggcacagcagttaacaaaaagctggctgtattgtgaagatcatagaaagtaaaagaaaattcatgtcagtgtgtgtgaaattgctaagagaaactgaagaggtaaaatgtttacgctaaaaattcaggtaataaaaaggggcaggctgaggcagatggatcatgaggtcaggagatcgagaccatcctggctaatatggtgaaaccctgtctctactaaaaacacagaaaaaaaaattagccgggcgtggtggctggcgcctgtagtcccagctactcaggaggctgaggcaggagaatggcgtgaacycgggaggcggagcttgcagtgaacggagatcgcgccactgcactccagcctggacgacagagcgagactccaactcaaaaaaaaaaaaaaaaaagtgtgggggcagcaatgagaaattagttttcctctctctcagacctgcagtcctcctcagagccagtcactgttaacaggtttctttttttattcttctagaatatttatatttgcaagaatagatgtgacacactggtgaatccactgttgaacttaagaactaaaacactaaccaataatggtgaaactccttgtatattcctcctaaattgtatcttccttgtgtttgttattcttgtttggagatggggtcttcttgcagttttgctcaggtagggctccaagtcatgatcctcctgcttcagtctctcgaatagctgagactacaggcatgcaccaccacgactggcttgtgtttattattatttaggagtttttaaaaaccttgtatctccccacatttaaaaccacaggtacaaaaacatactaaccacattgatactgttgtatatcttgcttttccccctccttaagctgtattttacagttcactgcaattcctgaatagttctcttgcacagaagcaagttgagtttttaggttgattcctatctttggttaaggctatatagcagattcttttttttttttttttttttttgagacggagtctcgctctgtcgcccaagctggagtgcagtggcgcgatcttggctcactgcaagctccgcctcccgggttcacgccattctcctgcctcagcctcccgagtagctgggactacaggcgcccgctaccacgcccggctaattttttgtatttttagtagagacggggtttcaccgtgttagccaggatggtctcgatctcctgacctcgtgatccgcccgcctcggcctcccaaagtgctgggattacaggcgtgagccaccgcgcccggcctatatagcagattcttagaggagagatgcgaatacatgtctttggaataatttcctagcagtgggaatactgtgtagtttacttttggtagatgtggctcctgttaactctgagaatacctcacatgtgctccagccatgaggtcatattgccagcttctgagtatactgataggtgagcctgggtttctccaaaagtcaacaagtagcttaygaaatgtacctgaccaaccagagcattgttctgataatccctccgtgacatcactccccatctccaggcattgggatcccgtggcagttgcagcactgaagtggagaaggagacccaggagaagatgaccatcctccagacatacttccrgcagaacagggatgaagtcttggacaacctcttggcttttgtctgtgacattcggccagaaatccatgaaaactaccgcataaatggatagaagagagaagcacctgtgctgtggagtggcattttagatgccctcacgaatatgaagcttagcacagctctagttacattcttatgatatggcattaaattatttccatatattatataataggtccttccactttttggagagtagcaaatctagcttttttgtacagacttagaaattatctaaagatttcatctttttacctcatatttcttaggaatttaatggttatatgttgtctttttttcctatgtcttttggctcaagcaacatgtatatcagtgttgactttttctttcttagatctagtttaaaaaaaaaaaaamccacataacaattctttgaagaaaggaagggattaaataatttttttccctaacactttcttgaaggtcaggggctttatctatgaaaaagtagtaaatagttctttgtaacctgtgtgaagcagcagccagccttaaagtagtccattcttgctaatggttagaacagtgaatactagtggaattgtttgggctgcttttagtttctcttaatcaaaattactagatgatagaattcaagaacttgttacatgtattacttggtgtatcgataatcatttaaaagtaaagactctgtcatgcatttttccccattcttttttttttccctgtctccgtgacaaccagtggttcttcatttttgatcatgcgaaatgcaytttgacccagatggtctgcagaacttcacttaggacattagcacacaaatagcacacatatcacatayccatttatatacataattagaaaatgttcctgatacatgtgtcatgtgatttcttccaacaaatgttttggaaaacagcaagcaactagtctgtaggttgtcttttctctagagatccttgtcctgggacagcctggggcaagttattaagcatatttccttcctggtgggctagatgatgtgcattatacctgtagtaccttcatactagcccttacaagttaaatgtcctgtggccatcttagccgaaagtctttggttgcaaaatcttataggtaaaaacagttgaaagaacattatgggatttccttgcttgttctgatacaatacaactagatgaccttaaaaaccctcatatttaatatgactcaggattttatttttcagaccactactgtctctagttactgtttcatttctctgttcctttttaatagaattcctcaaaagagtgactggatgagcttttcctgttttttttttttttttttttttttttaaactgttaaaaccctcaaggcttgctgtgccactgaagctgtatgtcaagatcagcaatgtggtccaggttgagaaagctcatcctcttcctccttgaccttcagtactctgacagggttgaccattccttccttgaagcactttttttgagacagggtctcattctgtggcccaggttggagtgcagtggcctggtgtgatctcagctcactgcaacctccgtgtcccgtgttcagtcggcccacctcagtctctcaagtacctaggactacaggcacacaccaccgcacctggctactttttctgtttttagtagagacagggtttctccatgttccctgggctggtctcaaacttctgggctcaagcgatcctcctgccttggcttcccaaagtgctgggattacaggtgtgagccactgcacccagcccactttacttagcttccatcgtgcagtattgtgcttccttgcttctcattctctccctcattcttccttcaactttttttttttttttttttttgagatggagttttgttctgttgcccaggctggagtgtggtggcatgatctcggctcactgcagcctctgcctcccggggttcaggtgattatactgcctcagcctccctagtagctgggactacaggtgtgcgccaccatggccagctaatttttgtgtttttagtagagacagggtttcaccatgttggccaggatggtctcaatctcttgacctcatgatctgcccacctcggcctcccaaagtgctgggattacaggtgtgagccactgcacccggcctccttcagcttaatttattagtcttttcacgctgctgataaagatatacccgagacagggaagaaaaaggtttaattggacttaaagttccacatggctagggaggcctgagaatcatggcgggaggcaaaagacacttcttatatggtgacggcaagagaaaatgaggaaacccctcataaacccataagagctcatgagacttagagaatagcatagaaagacacccctatgattcaattacctccccctgggtccctcccacaacacgtgggaattctgggagatacaattcaagttgagatttgggtagggatgcagccaaaccatatcattctgcctctggcccctccaaatctcatgtcctcacatttcaaaaccaatcataccttcccaatagtccaccaaagacttacttcagtattaacccaaaagtccacagtacaaagtctcatctgagacaaggcaagtccctttgcctatgagcctataaaatcaaaagcaagctagttacttcctagatacaacgggggtacagatattgggtaaacacagctgttccaaatgggagaaattggccaaaacaaagcagttacagggcccatgcaagtctgaaatccagcagggcagtcaaattgtaaagctccgaagtgatctttgacttcaggtctcacatccaggtcacgctgatgcaagaggtgggttctgcccctgtggctttgcagggtacagcctgcagtggtcttgggcagctctgtccctgtggctttgcagggtacagcctccttcctggctgctttcatgggctggtgttgagtgtctgtggcttttccaggtgcatggtgcaagctatcagtggatcccattctggggtctggaggacggtggctgtctcctcacagctccactaggcagtgccccagtagggactctgtgtggggctctgaccccccatttcccttccatactgccctagcagaggttcttcatgagggccccgccccttcagcaaacttttgcctgggtatctaggtgtttccatacatcttctgaaatctaggcggaggttcccagacctcaattcttgacttctgtgcacctgcgggctcaacaccacgtggaagctgccaaagcttggggcttccaccctttgaagccacagactaagctgtacattggcccctttcagccagccatggccagaggggctgggacatggtgccaagtccctaggctgcacacagcacagggaccctgggcctggctcacgcaaccactttttcttcctgagcctccaggcctgtgatgggaagggctctctaataaaaatacaaaaattagccaggcgtggtggtgggtgcccgtagtttcagctactcaggaggctgagatgggagaatcacttgaacctgggaggcagaggttgcagtgagctgagatcacaccacgacaccccagcctgggcaacagagtaatgctctgcctcaaaaaagaaaagctgttagcagttgtagcagaaacatggttttacccgtggaatatccatgggctctgacgtagatattccatgtccagaccatgaaggtctctgacatggcctggagacattttccctatggtcttgaggattaacattagcctccttgctacttacgcaaatttccgcagccagcttgaatttctccccagaaaatgcattttaattttctatcacataggctgcaaattttccaaacttttatgctctgcttcccttataaaactgaatgcctttaacagcacccaagtcacctcttgaatgttttgctgcttagaaatttctaccagataccctaaatcatttctctcaagttcaaagttccataagtcactagggcaggggtaaaatgctgccagtctctttgctaaaacatagcaagagtcacctttgctccagttcccaacaagttcctcatctccatctgagaccacctcagcctggaccttattgttcatattggtatcagcattttgggcaaagccattcaacaagtctctgggaaattccaaacttccccacattttcctgtcttcctctgagccctccaaactgttccaacctctacctgttacccagttccaaagttgcttccacatttttggttatctttttagcagcaccccactcctggtaccaatatactgtatcagtccgttttcatgcggctgataaagacatacctgatactgggaagaaaaagaggtttaattggacttaacagttccacatggctgaggaggtctcagaatcatggcaggaggtgaaaggcacttcttacatggtggaggcaagagaaaatgaggaagaagcaaaagcagcctgataaatctatcagatctcgtgagacttattcactatcatgagaacagcacaggaaagactgacccccatgattcaattacctcccccttggtccctcccacaacacgtgggaattctgggagatgcaattgaagttgaggcttgggtggggacacagccaaaccatatcaccaaggttttgttcttggacttctctaacattctattggtgagaccacattcatttccaggctttattacctatactgaagacccaaatttctatctcaaacccatttctcttgagctgtagtcattaaattgcttatttgatattttgacttggatgtctggtaaacatctccatcttaacatgtcagtttggagggcttaacaaactgtatccagttttgttaaggctttactctccttattgctaagtgtagcaactcctaatctctgccaactgcaaatacagatttcccaaactggagaaacatgaagcaacactcatgttcaagtgcttagactcaatgtttaaatgggttgccaacagtatttttattctggattaatggagttgtgcttatttacttaactgcttgactattaatactgagccaagcaacccaacgttgccagtcacagaaaccaacagcagagaggttttatttttttgagacgctctttcgcccaggctggagtgcagtggcataacgatcagggctcactgcagcttcaacctcttgggctcaagccatctgcctgcctcagactccagagtgcagagattacaggtatgaaccaccatgcctggccgggagggtttccttttgtacacttaatacattatagggctttgtagcagtgtccctggcctctacccactagatgccagcagaaccccttcagttgtgaaacaaaaaatatctccagatattgtcaaatgtcccctgggtgccaaaaaccacccccagattagagaagataaggcactatacaagatgtctggaacattctaggtactcagcaaatgtttcctaattttctaaaatttgctgtccttttctcagactaatcattcttgattacaagtttaataatagctgcatcggtcaggacaggacaggttctgaaatctctgtggcttaatgtaacaaaggtttatttcttacaaaatctgatacaagttgggtgacttcagggtgactgttctccatgtggccgctcagtgatttggattacttccagtttgtgtctctaccatctcaccacatggtttccatgaaatttcagtgatgggaagaaaaagttggcaagcatgcatcagctctcacctgcttcagtcctcaaatgacacttgttctcagcatattggtgtaggtcacgtgtcccgacccaacacaagggaggctaagaaataaggggaagcccatggatattccatgggtaaaaccatgtttctgctacaactgctaacagctttttttttttttttttgagacagagccttactctattgcccaggctggggtgtagtggcatgatttcggctcactgcaacctcccgctcccaggttcaagtgattctcccacctcagcctcctgagtagctgggactacaggcgcccaccaccacgcctggctaatttttgtatttttagtagagatgcggtttcaccatgttggccaggctggtctcgaactgctgacctcaagtgatctgcctgccttggcctcccaaagtgctgggattatggatgtgagccaccatgccctgcctgctaacagctttctatgtgccagctagttgtaagaacttttacatttatattgactaatttaattctttttttttttttatgggatatgagactgagagaggttaaggaaccagcccaaggatgtgcagtgatggagccaagattcaaacttgcaatccggcttttgcatctgtgtttaaccacggtgtgtactgagtattgaacaacttcatagctatataccttttatgtatcttacccatctgattcttttccctttacctctcccaaattgtagagtgatgctcttcagttgccctctgggcaattttatgtcatgtaaacctacagaggatgccctgataaaaggcataaaatatggctcacacctgtaatcccagcactttgggaggccgaggctggtggatcatttgaggccaggagttcgagacgagcctggccaacatagcgaaaccctgtctctactgaaaatacaaaaaatttactggggcgtggtggtgtgcacctgtagtcccagctactcaggatgctgaggcatgagaatcgcttgagcctgggagttggaggttgcagtgagctgagatcgagatcgcaccactgcactccagcctgrgtgacagagcaagactccgtctcaaaaaaaaaaaaaaaaaaaagacataaaatagtttacagcaagccattgtgtaaccttgtggtaacatctcacaaattccctgaagaattaccccttccactttctgaatgggggagaggagagggaaacttgtagaaaaaaaaaagtaacttgtcagaggccacatgtccaatctctgcttctatcaagggaaggccattatgttctatgcacatatataaacacacagcagccctgcaggttagacactgtaatcccacttccatggatgagaaagctgaggccc

SEQ ID NO: 95464 - DNA, 39262 bp, Homo sapiens
tacagaagaaaaacaaaacctggtttgttctaggacctatgtgttccttaaagtcttagtattgctatgtcacatttagcacgagtgactccattttggtttggtttggggcctagtgctcattccaaaacaatggcctcccctaattttgtttttaaatattccccctttttggtcacattctcccttaggtgagagttcttacttaggtgagacggtgaccaaaacttagggccttaacgccactctcagttaccatcattttgggtttctggtctcagcgtgtcattcataggttatggtgtcctcatggttgcacatttctttttttgaaacagagtctactctgtcacccaggctggagtgcagtggtatgatcttggctcactgtaacctccacctcctgggtttaagcgattctcatgcctcagcctcctgagtagctgggtttacaggcaggcaccgccacacccagctaatttttgtatttttagtagagacagggtttcaccatgttggccaggacgatctcgaactcctggcctcaagtgatccacctgccttggcctcccaaagtgctgggattacaggagtgaaccaccacacccggcatggttgcacatttctttcagctcttgtcattccaactgaagagagaccgtttgatattctaaagatggctgtgtgcaaacacttaaaacctttgagagaatacagcacaccagggagactactattatgactatcgcgaggataacaccaagtgtttggagtattctccttatccagggtccccataaaccaaaccacctgaaattaaatagatcaaagaatgagctagatgaagagtctactcgcttaactaagcagtctttccactaatcccctacaactgaatctctataatgcccgacgtgatatatttatccataggccacaagtgccagcagctgcacagatacttctgtgccagtaagtaatctagagcaattccattatttagcataactttcataagataaagtctgttgtggaaccatagactttacagtagaacctgctatagaacctatcatgggggatacatttctaatcattgccccttttactccaaaccatagaaaaaggacttaacaaatgatgcccttctagaggagtgaaggcctcctggcaatgatttctttaacccatgatgtgggttaagaggagtgagccaatgttctaacaagcagccacagctggaaggcaaaaacagatccccaaaatgaagggtcccatttttatactggatcctggatccccaaaaagaagggaaatgctaccagagaagatagtgcaatgcttctactgtggatttcattgcaaggcaacccaaagccaatcagctcattttgtaatcagcccatctcttatgggaatctcatatttagcaggggtgagggggtggggtggagatgtttccatgcctctaggtggkcaagagcgtgcttctttgatccaagcgtgcaaagagccaagtatccctcctaactgccattagccatcccttaaaatatattcgctacctggttattacacaccaaggctaaaagctctctcacaatgcaaagtaattttggacaacctgcccccaaagtcacaagtgtcaggtaatgtaatgtaaaacagaacagagccttagactttgagaggactctatcctccttcaatttctggggttacatgagggaaacagaggtttttcctagaatggggtctgtgacacctcctctgtttttccccaggagtcccaggctgttagtaattatcttaggttctctcatgtggacctcaagaatggcaagaagacaaaatggagaaaaacaattcagttgactgaaaagaaaaaaaaaaactttaattttccttcagaaaaataagatccaagaagagaaaagaaaacaaacataaaggctttttaaatatatgtacagtttgcatatccactttttattaagctgattttaaccatatagctcttttttcttaaaaaaaaaactgttaaatttttgttttgtttgtttgagacaaagttttgctcttgttgcccaggctggagtgcaatggcatgatctcggctcactacaacctccacctcctgggttcaagtgattctcctgcctcagcttcccgagtagctgggattacaggcgtgtgccaccacgcctgcctaattttatattttattagagatgaggtttctccatgttagtcaagctggtctcaaactcctgatctcagctgatccactctccttggcctcccaatgtgctgggaatacacgcgtgagccaccgtgctcagcccaaaatcttttattaccagactagccaggacagccaatatttctggcttttgaattctaccacaggtaacctcccatgtgaaattaatacattttaactaaggtcataacttaaccatggatgcataaagtgtcttaaagagatggtaagcagtttttgttttcgttttctaataattagagtctccccaaaggtagttcagcaaaagtaagaataaagacagaaaaccagaatcggtccatggggaaaaagaatcaataaatggcaaaaagttacacaaataacaaaccagaaagggctcactccctaagccccctgagccaagaattgaacctgggccaccactgtcaaatgccaaagccttagtactgagctaccgcattaagcactttctattgctcttcccagaaggaagattttgagcttgcgaaggcttttaactgctcaagataatttttagggctacctatgacatgaaccccaaaattcctgtcctctggatggcagaatccaagataaagtatcctcacatggtcacaaggttaagttcaaggacataaaacaacatgagagagaaacttcatctggtattggtttcagggactcacagaaaagtttgtaagtgaccagcctgctgaactggctttggacagttggcttatatggctcctaagtccatgttctatcctgtgatgccccctccattatagaacaacacagaaaaacaaattcatagcactaagtacaccagattttctatagcctaaactagtctcataagtctttttttctattaatcagacctttgtagaggagacagtgatgtttaacatacacacacacacacatacaggccagaaagttggctaataagttgttaccctttttgccggcataccaggtttccaggttccctttctctgcagcttccagaagaacggagcggcctttgataactgttcactatgctatagctgtgggggccaagcccactacaaaataaataaataaataaataaataaataaataaataaataaatatcatccttttctgttttatggaaccataggcaaagcttctcaactttgtaagatgctgcccgatgggctgcatggagaaccgaattaacattttccgtctcagctgaagcaaaatacacataacaaaacagatagtagtcacctcattgggcacccagtatcaccctagcaaggctcaaactgtcttcctttggtccctatcatctttgatccactcaaggtggggagggatggcatcaatgagtagtctctgggcaagacaaagagcagagagttaccccttaacagtcaggcctgttaagcttttttttcagagctcactgaatgtgaccatacttacagagggttttctgagttaggcctgctggacttgcatcagaaattccctcagagatcccctccacatatacaaacacacacacaaagacaagacggacagaaggccttccaaaccaagatccctaaccaagaattccaagagtattccttccaaactatcctattctccatctgagaagtctccccgaaatcttactgattgaggagaagtctccagaaccaagactcttcctactaattagggagagtaaaccgagacccctgaagaagctgaaccaattgggagaaggaaaggggtgttggcagcacctagactactcaccaaatcagacaccccataatggggctgcagctgcagacaatccatgatggggctacaaacagacactgtgataaggttacagttacaggcaccccatggtggagctacagagggacaccttgccatggagctctagttatgagatatctccccaggacaatttctctattgcaaagtgtactccatacatattgggctagtagtgccctgccgatagagatgacgccagagtcagcccccagtccaaaactaggtggccgcttgggctggcctctggatccatcgccagagggggtctacagaaccggggcaggtagcacaagagcaatcccgaatgagcccccaaatttttaactgctcaactggttcaccatgcccactacctacacagctgatttatcaaaataggggaattgcaatagagagagtaattcatgcagagccagctgtgcagtctggctgagttttattattactcacatcaatttcccctagcattcagggatcagaggtttttggggtttttgtttgtttgtttttgaaatggagtttcgctcttgttgcccaggctggagtgcaatggcacaatctcagctcactgcaacctccgcctcccaggtttaagcgattctcctacctcagcctcccaagtagttgggattacaggcatgcaccaccatacctggctcattttgtatttttagtagagacagggtttcaccatgttggcaaggctggtctcgaactcctgacctcaggtgatccacccgcctcagcctcccaaagtgctaggattacaggtgtgagccactatgccccaccttggagatcagagtttttaaggataatgtggtgggttaagagaggccagtatgccaggagtgctgattggttgtgttggagataaaatcatagaaagtcaaggctgtcttcttgtgccaagtcagttcctggttgggggacacaagatcagatgaaccagtttatcaatctggtggtgccagctgatccatcaagtgcagggtctgcaaaatatctcaagcactggtcttaggttttacaatagtgatgttatccccaggagcaatttggggagggtcagaatcttgtagcctccaggtgcatgactcctacgtgtctaatcttgtggctaatttgttagtcctacaaaggcagtctagttcccaggaaagaaggaggtttattttgggaaataacttatcttattttttaaattaattaattaatttatttatttttgagacagagtcttgcagtgtcaccaggctggagtgcagtggtgtgatctgggctcactgcaacctccacctcccgggttcaagcgattctcctgcctcagcctctcgagtagctgggattacaggcacgcaccaccacgcccggctaatttttttgtatttttagtagagacggggtttctccatattggtcaggctggtctcgaactcctgacctcaggtgatctgcctgccttggcctcccaaagtgctgggattacaggtgtgagccaccgcgcccgcccaggtgattgtattttaagagccyggggctgggaggtccgggtactagtcccatctctgctttggctttctggatggctttggacaagccagtgcaacttctcgaacctgttgcctctcatataataggaacctccgccacttcttgaaaacttactacaagccaagtattgtgatcaggggtttctatacgtcatctcacagttctattttatttttttgcttcagagagaaacaaaaataacgctccggaagactgagtaacgtatatatgagcaggagctggtgactggcataggctggactcgatccagctctgtgattctaactctagcaaccctgttttttccattacaccatagggcgcgctctccccatgctcctgagagcaggacatagactatgccctgcgcaggcagccgtccgcctcctgcagggaatgcttgctcctgggtgcacgcacggataccgcgatggtccgagaccacgctctgggacagcaagcctcaagcctcgcacaggagagggccgcggagcttcctcgacccgccccgccgcccttcccgcgggaggccccgcccccgccccccgccccgattggctgtcgggagagaggcggggcctaggggattggctgcccggcgaccgcgggctgacgtggcggggctggcgtgtgggtctcgcagcgttgctcacagaacagagtagaggcggcggcggcggcggccggacccagactggtagtgaggctttggaccccgagccgctgcaatgccgctggagctggagctgtgtcccgggcgctgggtgggcgggcaacacccgtgcttcatcattgccgagatcggccagaaccaccagggcgacctggaygtagccaagcgcatgatccgcatggccaaggtgaggcggcagctcccgggacccgggattcgggcgccgggaggggcggggcggggccgcggggagccagggccacacggcctccgcggctgggtaccctggtccggcctcttcccgcccgccagttccgttttcggaatccttcggatccctcttcctcaccgtgtccgccaccctcgtgacctttctgcattacagcagctgcctcctaacccgacctgtttcctccccgttctggtgccagaataatctttctaaaagtcagacttgatcagaccatcccccctgcctggcaccttctgtggctccctcctgcccgcgggtagagtcgaaaccctttaacatagccttcaagattttaatgactgggccccttccagcccgtcataattcttctctgacattcttcagcgacacagagttactttcaggaatgacagttcctggaagttgctgtggtctctctcacccgccattccctgtatatgaaatatgaagtggttaaaagccgggcctttgagttcaaatctcagttccaccactactagctgtgtgaacatgggctgcttacttagcctccgtgaacccttttccccatttgaaaacggggcttgaaaacaacagttctttccacatggagttgttatggggatcaaatgagattctcagatagagctctgagcccagcacttggcacacatgagtcggtaaatgcgtrctccctcttctgttgggactgccatattcttcattacgaccccagcccccagcataaggcctggcctgcactatgattctttggtttagagatagctcaccccatctttcctttcccttcatcaatgctactcaactgattttgtatcatttgtgataggttttttaaatgtttatttatttatttatctatgttagagacagggtcttgctctgtcacccaggctggaggttttctcttactgtttttttttttttttcctggttttttttttttttttttttgagacagggtctctgtatcacccaggctggagtgcagtggcatgatcccggctcactgcaacctctgcctcccaggcttaagtgattctcccacctcagcctcccgagtagctgggacccacaggcgtgaaccaccatgctgggctaatttttttgtagagatggggtttggccatgttacccaggctggtctcgaactcctgagctcaagcaatctgcccaccttggcctccgaaagtgctgggattacaggtgtgagccaccaccctcggcccttgctgttccttcgggactggttttatggaaacctaatcactgaatcataaaaatactttacaaaaataacattgctaacattttttgagtgcttactctaccaggtactaagctaaatgctgtacatgcaccatctcatttaatttttacaacaacccaatgccatgatgctgccgatttcattttaaaggctaagagaaaataagtgacttaggcaaggtcacatagctagtataataaatacagtaaggggttttttcagtttttgctcctaagccacaggactccagcctttcttctgcaacattgttttctagagggaaattcccactcttaatttgaaggagcagtctgtttttcctcttggaatgccgaagttgtagaaatatctagagatactgaagccatagaaacaaagctgtactgaccaggtgcagtggctgattcctgtaatcccatcactttgggaggctgaggaaggcagattgcttgagctcaggaattcgagaccagcctgggccacatagygagaccctgtctctaattccattgagctggaatctaggtggctgcagcctttaggaaagggatctggccagctctgctagagacactgtgcaactttagtcaggtcagtctgggccttgggatcttcatctagacaatgagagctctgttgcccaaggtcactttcagttctaatgttctttgaactttccagcatcaagtcctgactctaccatcttatgatttgtctaagagcaggagtagtgatctcagcactgacatttctggacccaagaagtttttatttttttttttcaagacggagtctcgctgtgtcacccaggctggagtgcagtggcgtgatctcggcttactgcaagctccgcctcctgggttcacaccgttctcctgtctcagcctcccgagtagctgggattacaggtgcccaccaccacacctagctaattttttgtatttttagtagagacggggtttcaccatgttagccaggatggtctcgatctcctgacctcgtgatctgcccacctcggcctcccagagtgctgggattacaggtgtgagccactgcgcccggcagccaagaagtttttaatagcatgaatacctctgtgtctacagaaatggccgtgagatgggactttagtgggttttaattactctttttcttgagtagattgtttttgtttgagtcaaggtctcactctgttgctcaggctggagtgcagtggcaccatcatagctcattgccacctcaacctctggggatcaagcgatcctcccccctcagcctcctgagtagctgggactacaagcgtatgccaccatgcctggctaatttttatattttttgtagagacagggtcttactatgttgccgaggctggtcttgaactccttggttcaagcaatcctcccaccttggcctctcaaagtgtttggattataggcatgggccactgtgcctgacctcttgagtgttttttgtttttttttttttatagtcaaacaatccggcttttatattattgcctctgctcagtagaagtcatctaggggctggggcatttttgttttgtttgtctgctttttaacatgtaacctgttcaaagaaaatgtcatggagaaaagcgccagtgcaaagcagctaaaagcagagttgctattgttgaaatcagagaaagaggcatagggcactgtccctggatgttcctgtccctgagagggcctcattaggacagtttacacatcctggaggtagcccaaactgcttttatatcgatggagaaactgagtccagagctgggaagtgacttatctaagagttagggtcaaagttaaaccagaatttttctttactaaattctggtccagtgctgagttgactattctttgctcagttatataacttaaaatcttccttaactctttgatccaatgtttttaatatttacaatgcaaaacaaaggaaaaaagtcccatttttttttcttttggcatgttaagagaaaaaaatagggggaggtctcccatctccaaacaaccttttcttcctttcagactttcttgccttttctgttcctcttccttggaggtccttaaggtctctgtcagtctatgttgtttttaaagatggtgatgtcggctgggcgcagtgactcatgcctgtaatcccagcactttgggaggccaaggcgkttggatcacctgaggtcaggagttcaagaccagcctggccaatgtggcgaaaccttgtctttactaaaaataacaaaaattagccgggtgtcgtggtgggtgcctgtaatcccagctacttgggaggctgaggcaggagaatggcttgaacccgggaggcattggttgtagtgagccgagatcacaccttctgcactccagcctgggtgaaagagcgaaactctgtctctaaataaataaataaataaagatggtgatgtcatagtggttgctccagaattttttcctttttttgagaatctacgacagtcactgaaagatgtcctaatgtgtgttgtaggagtgtggggctgattgtgcyaagttccagaagagtgagctagaattcaagtttaatcggaaagccttggasaggccatacacctcgaagcattcctgggggaagacgtacggggagcacaaacgacatctggagttcagccatgaccagtacagggagctgcagaggtacgccgaggaggttgggatcttcttcactgcctctggcatggatgaggtgagtcctctgctgctctgtcatttgtcactttagcagaccaagggtcagcaggcagcctggtgacttccggcttagggmcacctccagcccttgctcatcctttctgttcccagctactggagaggctagcaggcgccaaagcccagtgagaatctgtgggaaggatgccattgttttaaaaacacattgtctctggccgggcttgatggctcacacctgtaatcccggcactttgggagactgagggggatggatcacctgaggtcaggagttcgagaccagcctggccaacatggtgaaaccccatctctactaaaaatacaaaaattagctgggcatggtggtgcrtgcctgtaatcccagttacttgggaggctgaggcaggagaatcacttgaacctgggaggtggaggttgcagtgagccgagatcacaccactgtgctccagcctgggcaacagaacaagagtccatctcaaattaaaaaaaaaaaaaaaaaaggccaggcgcggtgtctcacacctgtaatcccagcactttgggaggctgagacaggcaggtcacgaggtcaagagatcaagatcatcctggccaacatggtgaaaccctgtctctactaaaatacaaaaaattagctgggcgtggtggcatgcgtctgtagtcccagctacttgggaggctgaggcaggagaatcgcttgaacctgggaggtggaggttgcagtaagccgagatcgcgccactgcactccagcctggtgatagagcaagattccgtctcaaaaaaaaaaaaaattaataataataataatagtaataacaataacaagttgtctctggaagtaggggtcagccacactggaatcccagagtccctccaagctgtagggacaccccagctgggccaggtttctcccagtagaaaatggtctgggaaccagggmctgggtgtggtggctcacacctgtaatcccagagctttgggaggctgagctggaaggactgcttgaggccaggagctcaagaccagtgtgggcaacacagggagaccctatctctacaaaaaacacaaaaattagccaggcgtggtggcgtactcctgtagtctgggaggctgaggattgcttgatcccatgtatttgagactgcagttagccatgactggaccacagcactccagcctgggtgatagagcaagaccctgtctcttaataaaaaaaaaaaaaaatagagcaaggaaaccacagttctggagtccgctccttgctgactagccttgactgacttgagtggggggacactggcactgtccagaagggaatggctcacaggatggtcaccggtggtttttggcttggccatgctacatcctggaagagtacagctcgtgccaggtctcaggtcccatctgctctgtgacctgcctccttaaaattccttcatgtgttcttttgaatgtaaaaaaaattttasttgtaaaaataacattacagaaagtttagaaaatgagaaaagggaaaaaactgacccataatccctctatagcagttctttttatatatttcctcctgaagtctttttatattcttgttttattgcctgctggtactatttagtgaacatcgagttctgtgcctgcttgttttagttaacattatagcacaaacttttaccccaccttatgcttaaagattttaatagcaacgtaatatttcttttggtgcatgtactatactgtacctaaccattcctctacttttggatacggaagttatttcagttttttttttttttttttttgagacagagtctcaaaaaaactgggggaagagtatataggatttctctgtgttctttcttacagctgcatgtgaatctaccattatctcaaaattcaaagtttaaaattaaaaaaagtttcttcaattttattttattttatttattttatttttttgagatggagtctcactctgtcacccaggctggagtacagtggcgtgatctcggctcgctgcaacccccgcctcccaggttgaagcgattctcctgtctcagtctcccaagtatgcatgcaccaccaggcctggctgattttttttgtatttttagtggagacagggtttcaccatgttagccaggctgatctcaaactcctgacctcagcccatccgcccgccccagcctcccaaaggtctggggattacgggtgtgagccaccatgcccagcccagttttattttttgttgttgtttgcttgttttgagacagagtctcactgtctcccaggctggagtggagtggtgtgatctcagctcactgcaacctctgcctcccaggttcaagttattctcatggctcagcctcctgagtagctgggattacaggcacctgccaccaggcccagctaaattttgtatttttagtagagatggggtttcaccatgttggccaggctggtctcgaacttttgacctcaggttatccatctgcctcagcctcccaaagtgctgggattacaggtgtgagccactgtgcctggcctagttttttttgttttttgagatgggatcttgttttgtcacccatgctggagtgcaacgatgcaatcatagcttactgcagtctcaaactcctggcctcaagtgatcctcctgtctcagcctgctgagtagctgggactacaggcatgtgccaacacgcttggctaattaaaaaaaaaatttatagagacagggtctcactgtgttgcccagattgatcttgaactcctggcctcaagtgatcctcccatctaggcctcccaaagtgctgggattacaggtttaagccactgcacccagcctgtttttttgtgctaataagtagtgctgagatagacatcttttctctgtttggggttgtttccttaagatggcttcttagaaatagatttttaggtaaaaccttagaacatttttatgggtcttgaaacactttttcttttggtcaaccaggttatttgaagcagacttctgactctgtgccacttttccagttctaaaacatgtgtgtcgactgagttgaaagaagcacacatgcagctcaggccagaggtaatgggtggtttaaaaaaggaggaaggtggagaacctaggcctctagagaacttggcagtttcaggctacacttctgtagaccaaattcattccttaattcacagcattcgtacgcatgacattcttcaaatgcagttgtgtacttaacaatcctaattccctattttttttttttaaagacggagtcttggtctgttgctcaagctggagtgcaatggcacgatcttggctcactgcaacctccacctcccgggttcaagttattctcgtgcctcagcctcctgagtagctgggattacaggcgcctgccaccacacacggctagtttttgtatatttttagtagagatggggtttcaccatgttgaccaggctggtcttgaactcctgaccttcagtgatccgcctgcctcggcctcccaaagttctgggattacaggtgtaagccaccgcacccgccctaattccctacttttgaagtacacattattgtttatgaagcatcttcacatacagtaatatattttatccctacagtgccccattttacagatgaagaaatggaggaccagaggggccagaagtttgttcagtatcacacagttaggaaatgggtcttaaaggtagcagatctgatgcctagagcagtatgctttccacagtccctcagctgctgctgcctggctggcagcccaggcttcccagagcgtagactcccactgtgaatgcctgaaagctcaggagagtctccgcatgcaccacgctcggtaccagttcaagactgaagttggctggagagtctctgggcccaagagctgccttgggagtggggacagattttttttttaaacctacgtaaaaaggttagttagatatattgctgatcttcagttaattactgccctgcaacctggggcaggggcctcactctgcatccagtttcaaatctgagacctgggtttgctcaaattcagttcaaactggtgacatagcagcctgcattcagaaaggaataggtcttgtaagtatcaacaacagaaccaaagggacattattgtgttaatccttctgggcgtactcacagcccaggagagtttctgagattgtatgtggtgtcctctaaataaataggattgtttttcaacagagaattacaatgtttagcttctggtgaaataatattattcttttaaagtgttagtcactcctggtgctttttttttttttttttttttgaaacagagtttcgttattgttgcccaggctggagtgcaatcaatggtgcaatctcggctcactgcgacttccgcctcctgggttcaagcaattctcctgcctcagcctcccaagtagatgggattacaggcgtccaccaccatgcccagctaatttttttttttttttttttttttttttgtatttttagtagagacggggtttcaccatgttggccaggctggtctcgaactcctgacctcaggtgatccacccttcttggcctcccaaagtgttaggattacaggcgtaagcctctgcatccagctgcttttttttttttccccctggagacagaatgataacggtttggctgtgtctccaccgaaatctcaacttgaattttatctcccagaattcccacgtgttgtgggagggacccaaagggaggtagttgaatcatgggggctggtctttcccgtgctattctcatgatagtgaatgagtctcatgagatctgatgggtttatcaggggtttctgcttttgcttcttcctcattttctcttgctgctgccatgtaagaagtgccttttgccccccaccatgattctgagacctgcccagccatgtgaaactgtaagtccaattacagcttacagccttccccagagtaatcactttgagaagcactttcatttggaggactaagtcctaacctggttgttaaaaataattaggctcagtagttttgtcatccctcctcctccatagttgcttccccaggacacagtttttctaaaacttgaccatacctagtgttgaatccatagtaaggagaaatgttatgtgtgcatttcattgcagtgacaattaaaaacaataataaccaatcagagtaatgagaagtatatgaaggcggtttccaaagtgtggttcaggaacccctgggggattcatgagccctttcaggaggtccacaaaggcaaagctatttccataatgatactcaaatgttatttgtcctttccatcatcattctcacaagtatatagtggagttttccagaggctaggtgatgtgtgatgacatcattcctctggcagcggctcacctaatggaaggtgtgttgtgtgtctttttaaagaacagttttattgacacaccatccaattcacccaatcgagggtacaattcagtggtgtttagtaatatttacagagttgtgcaaccattaatacaattaccgttagaacattttttatcacccccaaargaaaaactacctattagcagcactcctcaattgccccaattctcccaggcctaggcaaccacttaccgatttttttttttttttgagacagagtctcgctctattgcccaggctggagtgcagtggtaggatcttggctcactgcaacctccacctctcaggttcaagcaattctcctgcctcagcctcccgagtagctgggattgcagtcatgcaccaccctgcccagctaatttttgtatttttagtggagacagggtttcaccatgttgaccaggctgatcttgaactyctaacctcaggtgatccacttgccttggcctcccaaagtgctgggattgtaggtgtgagccactgcgtccagcctcaaatttctgtctctataaatttgcctattctggatattgcatataaatagaatcatacaatatgtggtccttcgagcctgacttctttcatataacattgtgttttcatttatgttgtagcatatatcagtacttcatttctttttttgactaactcataattcaattttatggctatactacattttatttacccatttgtcagctggtggacatttgggttgtttctactctttggctgttatgaataatgctgctgtgagcttttatgtacaggttttatatggacatgtgttcatttctcttcggtattacatatatgagtggaattgctgggtcacctggtaactctatgtttaacttttttgaggaactgccagactgcttgccaaaatggctgcaccattcccgccagcagggtttgatggtgccagttgcttcacatcctcatcatttgtgattacctcctgattctagccatcctagtggatgtgacatggtgtctcattgtggttgtgatttgcatttctctgatgcatcttttcatgtgtctgttggtcatctgcatatcttctttggaagaatgtctattcagatcctttgtcagttttaagaattggattatttttctttatatattcttttgaaatttaattattttttcatgtatagccttccaatgaattgtctttatatattttaagtacaagtcctttagtagataaatgattgtaaaaaactttcctagtctttgggttgtctttttcactttcttttttttttgtgagatacggtcttgctctgtcgcccaggctggagtgcagagtggtgcaatatcggctcactgcaaccctggcctcctgagctcaagcaatcctcccacctcagcctcctaagtagctaggactataggcatgcgccatcagactcagctaatttttgtattttttgtagagacaagatctcactatgtagcccaggctggtctcaaactcctgagctcaagcgaacagccaaccttggcctcccaaagtgctgggattacaggcatgagccaccatgcctcgccctttttcacttacttgatagtgtcctctgaattacaaacatctttaattttgatgatgtccaaattatctttttttcttcttgtgtttatctatttatatgtttaaaaatttctcatttatttttatttttgagatagggttacactctgtcacccagactggagtgcagtggtataatctcagctcactacaacctccaactcccgggttcaagcgattctcatgcctcagcctcccaggtagctgggattacaggcgcacaccaccatgcccagctaatttttttttgtatctcttggtagagatggagtttcaccttgttggtcaggctggtctcgaactcctgatctcaagtgatctgccttcctcggcctcccaaatgctaggattacaggtgtcagccacctcaccagccatttttagcttttttttttcctttatttctcagttttaaaccacaatgtgatatcactgcacagctgtcagtatcgttaaagtaaaaagtggttggctggatgcagtggctcactcctgaaatcccagtactttgggaagctgaggtaggagggtcgcttgaggccaggagttcaagaccagcctgggcaacaatagcaagaccccatctattaaaaaaaaaaaaaaaagccaggcattgtggtgtgtgcctgtagcctcagctgcttgggaggctgaggcaggaaggcgggaggcttccttgaacccaggagcttgaggctgtggtaagccatgattgcaccagtgaactccagactccagccttggcaaaagagtgagatcctgtctctaaaaaaaaaaaaaaaattgataacaccacatggtgtcaaggatacaaagaaaatagatcattcatatattgctggtgggaatgtagaatgatccaatcactctagaaaacagtatggcagtttcattccttcttttttaaacagctttattgggacataattcatatactgtataattcaaccacttaacatagactgggagtttcttataaagctagataatgtgtttatcatatgacccaccagttgtcatttggtaatttatccccaaagaaatgaaaacttaacattcatacaaaaacctgtatgtgagtgtcattacaacttttattcttagtagctcaaaactagaacaagcaaaatgttctttagtgggtgaatggtgaaacaaactgtagtacatgcataccgtagagtactactcagcaatcaaaaggaatgaactatttttctttttttttttgaaacggagtctcactctattgcccaggctggagtgcagtggtgtgatctcggctcactgcaacctccgctgcccgggttcaagtgattctccttcctcagcctcctgagtagcagggattacaggcacatgccatggtgcccggctaatttttgtattttttgcagagatggggtttcaccatcttggccaggctagtctcaaactcctgaccttgtgatccacccacatcggcctcccaaagcgctgggattacaggcgtgagccaccgcgcccagccaggaatgaactattgatgcgtgcagcagcctggatgcatctcaaggaaatgatgctgagtgagaaagcagcatatgcagaagggaacatactgtacgattctgcttccatgacattctggaaataacagaattatgacagtggagaacagatgagtagttgccaaaggttagtaaggggaaggggatgtggttataaaggggtgacatgaaagatccttgtagcagtggcatcatggtaccttctgtatggtgaccgtggcagtgctcacatgagtctgtgcatggggtaaaattgcatataattaaatataggcacacagaaatgaatacttgtagaaatggtgaaatctgaataagattggttgactttgtcaatgtcattcacccagttgtggtattgtactatagttttacaagacattaccattgggggaaactgggggaagagtatatagtatctctctgtgttctttcttacagttgcacctgaatctaccattatctcaaaattcaaagtttaaaattaagaaaagattcctctattttattttatattttattttttgagacagagtcttgctgtcacgcaggctggagtgcagtggcacgattgtggctcactgtaaccttcgcctcccaggttcaagcagttctcctgcttcagcctcccaagtagctgggactacaggtgtatgccaccatgcccagctaatttttgtatttttagtagagacggggtttcaccatgttgaccaggctggtcttgaactcctgacctcaggtgatctgcctgcctcagcctcccaaagtgctgggattgcaggtgtgagccaccgtgcccagctttcattttaaatttttattttatttatttatttcactctgttggccaggccggagtgcaatggcgtgatcttggctcactgcaacttctgcctcctgggttcaagagattcttgtgcctcagcctcctgagtagctaggattataggtacccgccaccacacccgactaatttttgtatttttagtagagatgaggttttaccatttggccaggctggtctcaaactcccgacctcaggtgatccgcccaccttgtcctcccaaagtgctgggattacaggcatgagccatcgcgcctggycacaattttaatttttaattcagcaaatacgaataaataaaaccacatcaaaaaataaaaataaaaaagatctgcagactctttagtaatttttttttttttttgagacagggtctcactctgttgcccaggctggagagtagcagcacaatcatagctcatagctcaccgcagccttgacggcccaggctcaagcgatcctcccacctcagccttcttagtagctgggactacaggtccatgccaccacaaccagctaatttctaaatttttttgtagagatggggtctccctatgttgcccaggctggtcttaaactctgggcctcaaacagtctcccacctcggcctcccaaagtgctaggattacaggtgtgagccactgcacttggcctccttagtaatttttaagaatttgaagatgaaaacatttgggactccatgctgaatgctgtatacacataccccagctgtgtggtgtgtacctggctatatgatggcacgactgtatggtacacacctcagctgtatggtacatacccccgactgtatgatgcacaccccagctctgtggtacacaccctgctgtgtggcccatacccgggctatatggcccagtggccaagtgaatggactctagggtcagattttaagtttgaatatggctctgcctgttatttttggtatatccatgtggaggttatttaacctttttgtgcctgttttcttcagttgtaaagtgggcttcctagcagaacccatctgggagggaaagtgaagattaaatgtgatcgttaatataaagcatagtacacaatcagtattcagtgaatatcagttacaattaaggaaagcaacctgggctaagggctaggacatctgggtacttgcaggctgggacatctgggtacttgtcctggctttgtccttaactctcagtgtgaccttggtgagccccttccctgcctgggccaccatttcattttccgtgtgtgaccaagctaccatccagtggttctctctattctgatgtcctgagtcagcgcagaaccagggaagatgtcatcaaggtgacttgcacctggattggggacttttctgcttccgtccacgtttcctggaaatgcaagctccctgagctcctggatctgacctaggagaaaggtgcctccttgcccgtgaggctgccaaggcggagtcacttctttaggccgtgccctgcaggtggcatcggttgagaacccggagcagttgggtgatagggaggagtctggtgtttgcagcggggcttcctccttggttttccttccctctgctccccaggcagcccatttgcttggtgtctgtgatgggtgttttagagtcaggctctctgagctcagctcctggtgctcacactctgtgtggcttgggctcctcatgtaaccttggagccgcagtggcccccgtctgtaaaaacaggattgttaagatgctcctggggctatctggaggattcagggagctaaacccgtggggtgccagcacagggccaggtctacactcacccagcgatggctgttctgtgactcagaaccctttggagtttttctgcctcagcctatttgggcaggtaggttcctctggatgaggaatgccttttgtccccagctagtcccctgcctgacctagggcacaggcagtgagggaaagtgcattttttttttttttttgagacggagtctcgctgtgtcgcccaagctggagtgcagttgcgcaatctctgctcactgcaacctccacctcacgggttcaagcagttctctgcctcagcctcccgagtagctgggactacaggtgcccgctaccatgcccagctaatttttgtatttttagtagagacagagtttcaccatgttggccagggtggtcttgaactcctgacctcatgatccacccacctcggcctcccaaagtgctgggattataggcgggagccaccgtgcccggcaggaaagtgcattctttaagagcctttacgagagttaatttaccttgccctctgtcaaactgttggaggtagattggttccttgttctgtatttacctagcaagtggctcccagtgtttacctaccctaacttccttatagaaacaggcatttattgaatgcatattttctccacactgtatgctgttctagggcgttctctgtgtgctgaggaaaggttaaggtgtggcagaattttattaaggccaagaaaaccgtcagggcttctggttgaaagttgcaccaaggctgtggaactcaggtgaaacagcagaatgtctttagtctaaaaggaaagttctattgagaaggcaaatggaagccatgaccaaaaaggtgactcctgagggacatgctctcctcacacacagtggccatcccagcaaagccgcccttccctccagcacctgcctctgtcctaggcacggtgccctctgacaggctgctgccctgaggctggcccagcctatttgtggctacacccttcccctgactccctgttctccccagctcatcaccatgggctttttttttttttttttttttttttttttttgagacggagtcttgctctgtcacccaggctggagtgcaatggcatgctcttggctcactgcaacctccacctcccaggttcaagtaattgtcctgccttagcctcccgagtagctgggattacagacacacaccaacacgccgggctaatttttgtatttttagtagaggcggggtttcaccatgttggccaggctggtgtcaaactcctgacctcgtgatctgcccgccacggcctcccaaagtgctgggattacaggcgtgagccaccgcgcctggcctgggcttctttttttttttttccaatcctgaaggatccaaaacctgaggggagaggaagggactttagaaaaatctcagctccactcctctctttccttacccctgactcagatcagcagttcccagagtgtcccacaggacacagtacagaaatggggttctgtgggcacgtgttgtccaccctcattcattaattgatttagaatcaataaagggttttttggtttattttttgttttgtcacccaggctggagtgcagtgacacgacctcagctcagtgcagcctcaacctcctgggttcaagcaatcctcccacttcagcctcctgagtagctgggactgcaggcacacaccacacacccggctaatttttatatgttttgtagaaacgggatttcgccatgttgcctaggctggtgtcaaactcctgggctaaaatgatcctcctgccttggcctcccaaagtgctgggattacaggcatgggctaccatgcctggccagaattaataaagttctgagtcgaataagtttgggaaacactgggtttggaactcagctaagttgatttactgggaccctctaagaaggcattaaggcagggtagtgtttctcccaaacgaggctatccatgggacccatttctgcatgttgaactcagctgggagcccgaggagagttgtacatgcctgagctcccttcagactcccacagactttgtgctatggggcaggagggagagaggagtgctgaggctgccgggctgcatggaaccccagatagagggaacccgatagcacggtcggcaggctaggggaagtcaaggagtccctgaagagaaaggggtcaccagttgctgacccagcctgtagtagcccctaggcacagcgatactgtcttagggctgaaagttaggatcttccagattactcagattccctttgcccgatggctctgagtggcagttttctaaatgtccactgggtggcgctggctccccaggaggcggcaaaatgaggcgccccttccctttccagcaggaattggcctttttctttacttgaaaattacagaattccatgcagattttacagcctctgtaggtaagctttcacaaggtgtttttctgcacttgtcccccctccttgccccgatcgctctgcccctctcttgggggggtttctgcttctgtttatgccctggtgggccacaccacactcccacaagatgaacattatacaaaagaaaactcagtggaaggttccttctttaaacagaaagcactctcttcatctgccaaatgaagtgagaagggtaggaaaattagattttattgaaaaaatatatttaaaactgatgttttttcagttctgtcttagggctagttagcagtgttatgagacacaaacaggaaggagtgaggtggaaaggtatggaaggtactgggcatggcagctgaagcttgcaaccccagcactgtgggaggccagggtgggacaactgcttgaggtcaggagtttgagaacagcccgggcaacatagcaagaccccatctccacagcaaattaaaaaaaaaaaaaaattagccacatgtggtggcacgtgcttgtggtcccagctacttgggagactgaggcaggaggattgcttgaccccaggagtttgagaccagtctgggcaacatagcaagaccccgtctctaccacaaaagaaaagaaaaagatggaaggggaaaagagaagagttaaaaataaagcrgaggaagagcagtgagaaaggtgaaggaagggaggaaaggaaggaaacggtgggagggagggaggaaggaaagggagagagggagggaaggaaagggaggaaggaaagggaggaaagggagggagggaggaaggaagggagggagggaaggagacaggaagggaggtaggttggttggtccgtcggtccgtcggtcctagaccaatcagagtttgcatttcatttcagcaacttccctgggagagggaaagatttgtgcccatgtgatcaagtgtgagcaactcactaagccctaacttatttctgagtcaccattcagagacattgattttttcgacttttgatttccaacttcaaaacaaaacaaagggactcaagaaaacttttgaaggtgatgtgtatgtttattactcttgtgctgatggtagcagtagtgtatacttaagtcccaactcaccaaattacattatgtgcagtttttagtatatcaattacaccttactgaagctggaaagaaatgataataaaaagtttttgagttcttataatttgacagcaaactgagattttactcttataacttgtgatccactgattccttcagcaagcatttgctgacatttaccaatttcctgagtcttgttgatgaatactagagaaggatgttgaagagcactaaataggtaacctcaagcagtgacgttatatctgaaaaaagtgactgaggttcacttttaagtaggcagcgtgctttgaggcctgaaagggctcgggttgaatgggccctgccagccatggatccttatgtagaggctgggcaaaaaaatgctccattttccccctttcgccaagaattgaaatagccccttttcctgctcgtttggccgagtagaagggaaagcctttgaggctattcatgttttcactgcctggttttctgggtcaggattaggtcatgaccgtttcatgtttgttcatttggccttgggcccctggggcaggtagggtctggccaggggaaaggttcttttccagattcttttttttttttgagatggagtctcgctctgtggcccaggctggagtgcagtggcatgatctcagctcactgcaacctccgcctcccaggttcaagtgattctcctgcctcagccttctgagtagctgggatcacaggtgcccgccaccacacccggctaatttttatatttttagtagagacggggtttcaccatgttggtcaggctagtctcaaactcctgacctcaggtgatctgcccgcctcggcctcccaaagtgcaggcatgagccaccacgcccagcccttttccagattcctgtagccagcaaagaccagcaccaaacgtttgttgggctaatggatgggtggatgcaaatgaatgtttgcatttgaatgaaatgactgagaacaaatctttgcctgctttcaagttgctgagcgtccctctactgcctaagatgaggggtttttctacttgtatgttattccttgcctgtcataacaacagtgtttttggacaatggtgaaaaggagctccctctttgatttttgtagatggcagttgaattcctgcatgaactgaatgttccatttttcaaagttggatctggagacactaataattttccttatctggaaaagacagccaaaaaaggtaagtgtctaatttttgacttaaaatcgaagggagtccaaaccttcatatttttactcccctcatggtggcccactttcagcagatttcatgaagacaaattttagcctcttttcatttttttaaatagagatagggtctcgctgtgttggccaggttggtcttgaactcctggcctaaagcaatcctcccatctcgacctcccaaagtgctaggattacaggcatgagccactgtgccctgccagaaacctcttttcaatcagcctgtacttccattttttgtaagctaatttgaaagaaaatgaattaagaatatgacagtttttataagacatttagaaattctttttaagaatttttttttttttttaatagagacaaggtctgtctatgttgcccaggttggtcttgaactcctggattcaagtgatcctcctacttcagcctcccaaagtgttgggattacaggtgtgagccactgcacctgtcctagaaaattttttaactaaaatttataagaaattaaggatatgacagtatatataaaacctagctgggtatggtggtgcattactgtggccccagctactcgggaggctgaggtaggaggattgcttgagtttgagaccgcagtgggacatgatcgtgtaaagtggttttacaacatgaacaatttcatttgatcctcataacactcctaggactgaaacaggtcatgattatgatgcttgatacttatttcacaggggaggcctctgagactcagagacggacagtactctgcccaggcacagctagaagtggcagctccacacctcacattcattcacactcttgaatcagcactcattctactgtactgccatggtatacaacctattaatcagataagatactcattttcctcttggcagtgtgaaattcctctgcctctttaattcagttccttttgctcaagaacactgtcggggggcagaggggagcccacctttcctgtggccgagggcaggaacccaacaagctcctctctgttcccccacaggggctggcacagtgttttaagagatgtctgtggagttcagttgaatgatgagaccagcagttgggatgtgttggggagagtcagaacctctaaagagaaagtgctgatggtgttggtgctggattactcaggtcgcccaatggtgatctccagtgggatgcagtcaatggacaccatgaagcaagtttatcagatcgtgaagcccctcaaccccaacttctgcttcttgcagtgtaccagcgcatacccgctccagcctgaggacgtcaacctgcgggtcatctcggtgagcaggagggagggggttcccttcttgggccatttactatggggaaggcgtagtcttttttataaccaaaattctaacaaacatggcatactttataatttgaacatcctttgacagtcttgctgttaccaaatcaaattcgagctaagcagttgaggaagcacatacattctaaagagggtgactgtaaatgaaattttcttggccaggcgcggtgggtcatgcctgtaatcccagcactttgggaggtcgaggtgggcagatcacctgaggtcaggagttcgagactagcctggccaacatggtgaaaccccttcttattaaaaatataaaaattagtcaggcatggtgatgcgtgcctgtggtcccagctactcaggaggctgaggcaggagaatcgcttgaattcaggaggcagaggttgcagtgagccgagattgcaccactgcactcaagcctgggtgacagagtgagactctcagggggaaaaaaaaaaaaaaaaaagtctgtctgtcaacagacatttgggatgattttaccttttggctattgtgaatgatgctgctatgaacactagcgtacagataaatattcatcttttttcatactgagttataggaggccttcttgaaacttcctggctttttctgctttatttgctgactctcttattttctaatgctgagcatccctgaggctcatactagttatagtgacagccttgatggaaattactctctcccacgattttgcctactcagtcatttcacagatggtgaaatccagtcccaagtcgggaagcctgagatcccacagcagcttggtggcaaagctggaactagaacctgggcatgtccccctaggcctttgtctcttactgtctcacgccatctctctcagttcttcctgtagcactggaaatttaactttattcgaaaatatgtatgtaattatcattaaaactattatagtaacattaatggaattctatctatctatccacacatactagaatcctgatattgcagttgttttccttttatattttcctttcagtatagtatttgacattgttttccccataatataagctttcttacatgttgttatacagccattaacttaaaaagttagcctttttgaaaactgacattactctctttttacctaaactttctgtccctcccaatcctgtttttgcttcacttacagcttatctaaatcacgttatttttaaaatttaaaaatgatttctgtgaaatatgtaatgtcgaaagtaaacatcccctgcactcccatcccacagagattccgataattaacagtttagtagacgtgaccccagctattttccttttcagtgtatctccgtccccactcaaggtgctgtcatgtcctctctcttgacactacacattgcaggagttattctgccagcctatcccatcttgggcctgcacatagtacagtggtttgaattttcaaacttgtagcaacccgcactccatcacacacccttaagcctggttttcaaggcctttgccacctaaccctcctaatcttttgttaaatcccacctgaggccagacaccgtggctcatgccagtagtcccagcactttgggaggctgaggcaggtggaccgcttgaggccaggagcttgagaccagcctggccaatgtggcgaaaccctgtctctactaaaaatacaaaaattagctgggcgtggtggcgggcacccatagtcccagctgctcaggaggctgaggcaggagaatcgcttgaacccaggaggcagaggttgcagtgagctgagatcacgccattgcactccagccttggtgacagagcaagactctgtttcaaaaagaaataataaataacaataaaataataatacacgctacctgagtctttctactgtactcagctttctggtcaccctcaccaacaagactcacccatcttagagtgtcttttgttgcattcagtgaattatagataacggattaattatttatcattttcaccaaaggattgttttgagattgggctgtgtatattattgatgatatttgtgcatatagcacacttgctttcagcagctcaggctaattaaatgtgacagatggtttttgaatgaggttagacattcatttatagttctgttgttactcttggtgtattgtgcaatgtgaaacattcttaaaatgcattctttagaataacagtaaccatttttagagcatttacaatgtgctgagtgcttctcatgcatttacagcaacactcagcaggtattattatcatccctaggaaagagaggctcagagagcctcagtatcttgcccctggctgcacagctagtgagtggctaaaccggggctcaaccagatacgcttcacctggagaatatgcataaagcagcatgatatttaatgttatttttctttttccattttaaaggaatatcagaagctctttcctgacattcccatagggtattctgggcatgaaacaggcatagcgatatctgtggccgcagtggctctgggggccaaggtgttggaacgtcacataactttggacaagacctggaaggggagtgaccactcggcctcgctggagcctggagaactggccgagctggtgcggtcagtgcgtcttgtggagcgtgccctgggctccccaaccaagcagctgctgccctgtgagatggcctgcaatgagaaggtgtgtcctgccggactctactcggttctgctgccgtgtgtggaaaaaggatrggctggcctgagagggatggtcaggaccagccctccctgagccaggctgatgaaatgatcagtgaatgtgctcccacccgtgtcagcttcttcaggcttctcttcagtaatgcatgtcactctggcctgtagcagcagcaggagacacatgttatctaactttagcagtttctctggccacctagggtcacattagagtcttccactaattctctgaagcccatggccccagtactcctagactccagaatatgtaacaggagtgaggccctggaataagtcaagtctgggctcccttggagcaggtaagccctgagaaacatttaggcacggtgttccctgaggtaccagaagagcctgtggcatttcctaagccagggtggcactggtgggaagggcagtgagtcgttgcagaggtgggtgggtgatgatgcagctattccttgtgcaacagtgaccttcagacagaggaactggtgggcctagaagcactgcctggcatgctgactatcagggcttcctggaagccgtggcctggaccttcttgccttctgagtcatagagccaggcaggcatcctggggctgccaggcacacacacacctaacctgtaggctgtcggggtcaaggcaaagaccaaacaccaggcatgcctgggactgttgtcaccttttattctagtggggcctacctgcttccccaaatcaaagatgcatctataccaggaaattaaaataaagtaaaaagaaatagtttctttatagaggaaacaggagagaatyagaccagaaaccagagtaagatttataacagctgagcacttaatttggctctctgagcagacagtaaaacataacaggatgcatgattatcacttgacattttttcctggcaccacattccaagcagaattgattccttgtactcttacgtggaggatatagagtaataaaacacgtaatttatttgaaagcatttatagagaagacaaacactggtcatgagcttcaggtacccttcattccctcatctgcctgtattatctgccccttcctcgggggctccttttcttgccatctgcataacagccacattcaccatcttatgagtccttcatatttctattttaccaaacaaagtggcggtaaggtgtgtgccctggagaacggtgtgtcaggagttaagaatctcatccctatgttatgtttcatcttggctgtctgcaaccctggccaagtcacccaccctgtatgggcctcagtttccccatgtttacaatgagatactgagctgaatggtaaccaaaagaatcagagtttgcatgtattgagagcattctatgttccacgtacattctgtaatatcaccaatccttacagtcatctgacaggataagtttccatttgacagagaaactaaaacgtggcctataccccacagactgggatttgaacctggctccgcctacatagcctcagccctttcctttgcactttgttgtaaaggctcctcctctgagtctctgaattcaatctatactggttgaattcctgccatgtatgagatattctgagcagtgtagggggcaacrgagtgcctgctcccaaggtactgcctggggaagactgatcagggaccttgagtgtaaagtaaagtagtgtgcactagttacttctgtgaagctggcactgaatgttcattttgtccacagctgggcaagtctgtggtggccaaagtgaaaattccggaaggcaccattctaacaatggacatgctcaccgtgaaggtgggtgagcccaaaggctatcctcctgaagacatctttaatctagtgggcaagaaggtcctggtcactgttgaagaggatgacaccatcatggaagaaytggtagataatcatggcaaaaaaatcaagtcttaaaaataaagtgccattctctgaattctcagttcccttgctgatgctgtcaggtgtgtttgagtgaggcgagggcaggaatggcggtctccagggacctggctgtcatccacctccacctgctccttagacagcagatgtttctgggctaggccctgtgtcagcccactggagacagaaaaagatccagtgatgcaatctctccttcaagttggccagcttagtgcactggccaacagtgcattataaacagagcaccagaagaaggggtggttccaaacaaagtccatatcctccagttgctgggtggctgcagagaggggtgagagctggctgcacatgtcctttcctttaagccttcattctcacttccttacagccctttacttctccattgtctttatccctttcctgcccttggcctctgtgtttagttggcattgtatagcagtcactccacatcagagaaaggactggtcaaaggatcttgtaggcagaaaatgctgaaagcactcctttcagagcaaagagagggaaatggcatgtgttccttctctgaacaaatattgagggccatctttgtgccaggcactgctttaggcacagagtatatggccatgaacaagccccaatcccttcctcagagaacttccattcagatgggggcagatgcataaaaatccatagcatagtgattcagtcacacaatatgttagaaggtggtatgtgagccaggcgtgcttgtgtgagcctgtaatcccaactacttaggaggctgaggtgggaggattgcttgagaccaggagttcaagctataatacgatcttggatgggaacaggtgggagtcagggtttgtttacacgtaagtgagaactttaatgagttatcttcagaagcagtgaatgccccatccctggagatagttaatcagggagcagctgactactaccagaaggctgcgtaaggaataagatatgagtaaaggcccttctgggtctgggtgctagggacttgaagcaacatgaactggagggagctgtgatgtggacacgctgaaatcggtggggaggaagcggaagattcaagggacctcaagagacagaagagtcaggactggatgactcccattcattcacaaatgtttactgtgtgcctactatgtgtcaggttcctgtgctgtacgagggagaaggttcccaggctgcggatgatgtattcaggatgctgagggcttacctgtgggggtatcactgggtgctagggacttgaagcaacatgaactcccagtgaagaccatggttaaaagggacattattcacattttattaaaccaaatattagaaaattgctgtcatttaaaaatatctgcaagcaatttgccatatcaataaagaaatgtctacagattcaagtctgaaagagaagaaggtaagtgatcagtaacccttacagacatggaaaccaaggaagcctcattcctgtgctgagaatattctagtagctcctgctgctgccacatggcagctgggaataccagtagtctcagcactcggtcagtaccgtgcaagctcccttgggaatgctgataaatcctggcatgatacagcagtatatatgttttttttgttttttttgagacaagagtcttgctctgtccccaggctggagtgcagtggtgcaatctcagctcactgcaatctccgcctcctgggttcaagcaactctcttgcctcagcctccctagtagctgggattacaggcatgcaccaccacgcccagctaatttttgtataggactatagttttaaggcaagtttataacctttggctcatttgagcctcacagcacttggtaggtagtgctattatccccattttatagatggcactgagaagtaaaaagtgactagccctggtcacacaattgatatggactgaaactgccgctttctggctatcacgggccttgacacagctagtttgtgacctttacagtctagctctgtctctgctacatgaatcccaaatttttgaatcaagttcccctctgggccataaggcctcatctcagacccccaaggaaggcagtccaaaggtagactcaagtctcgcagagtaaccaggcactaggaaagcatcatgggcagtagctccacgagaggggccagagcaccaggcactggccagagaccagctgcattcaccctgagcagtagggcctggtggccatgagcacagacctggaactcacagcctgggcccagactccagctccaccactagctgtgcgaccttgggcaagtgactctgggtctccattttgccatgtgtagaattgggaaaactttctaccctctagggctgatgaaaggatcagatgagtttagtcgtaaagcattaaaacagtgcattataaactattaagagctgttattacttggcccctgcagctgtgggtctgggaagaggtcttggtcatcagggatgggcagaaatgttggggtcaagtgtattcatcttccctctgtcaggaacaccctctgcctgtcacaattcagtttgggccattcctaatagaattaatttcccctttttctcaggattcctgcagcatagtgcttaaaactctgtccagccagagttttaaagtctttggttagaagttaaggtgtttgcaaggttctgtctgcctggtattctgctacattgtctcatatcaaaagtgccatttttaactcaaaaactattgaaaattgtcagttttatatggttcaaactaatgcactgaaagtctatttaaaccacgaggattcggcgaccttggcctcccaccaagcacctatgaagatgctttaacagaatataacttcaaaaccgtctagggaattgacaaaacaggacgcagaaccttcagaacggagacacaaatccctggaaagaagcctcccactccctgctagcgaaggtggcctcctgtgagggcctactgttttctacctctgtcacttcattccagacagctgggcactctgggtttccttggcaacatctggatctaagggtgctcttaccctttttgtcccaagacagttgggaaacaccaccccctttggttgcttagcaactgtcacctgctgattccttcccaaaatcccctgagaaatgagtaagcaggttgaaagctgggcctaagggctgggccaggggacaggtcagatgcttgcctgggggtgggtgaacggggcacacgtctggcccccctatatcaccccggggtaactttacgcagctctgctttctttcaggacctcagactccccagatgagatctggctgggtgacctgtgaggcccgcctaactcagctcttctgttactcagtgataggcacctgctggttattaattcactgcttgggagggaaggggctttctgggaacttttcagggtggagagagtataggacaaagctgcccttccaaagcctccaatttagttggaaagacaggtcccagatttgtggctctgatagtgagattcttgttccttggttagacttcctggcgcaggtaagcctgcggaagactgagacaggtgaaaagacttttctgcatgaatgtgctggcagcagagaggtgtggaggtggaactatgcgacacatttctgactggagagtctctaagaagagtggtaggagctaggtgaggataagtaattttgggcagactagacaagccttgaatgctaaggtgaggcgcttgtatttttttttgttatttcatggaaactcctggaagccttttcatagctgaggggttaagtgaagttttaggaagatcactctagttttagggtggaagatgaggactgggagagggttcagaccaggaactgctaagaagctcttgcagcttctggagggagctgtgatgtggacacgctgaaatcggtggggaggaagcggaagattcaagggacctcaagagacagaagagtcaggactggatgactcccattcattcacaaacgtttactgtgtgcctactatgtgtcaggttcctgtgctgtacgagggagaaggttcccaggctgcggatgatgtattcaggatgctgagggcttacctgtgggggtatcactttgaaggaactggattaaagtagtgtaagtgatggtggggtgagggtgcggaggtctgatgagagggcagcagcagacttgtttagggcctgtttgaaactagcctaggagaggaaaccttcaaagcactgtaggcgtgattggtcggggaaagctggggcagggagagggccctaagaagcaggcagtaaggggaccagccacgctgatctaggtagattaggcgagactgggcagctgcggcgtacctggaggctgtcacgccggtcctggcccctagggcagccgggggatgctgatggccccctcccagagccgcagggccgggtagagcggctcctggaacgtggcgcggaaggtatgcaggtggctcatgccgcccgtcacgtcgtagaaggcgaggacgccggcctcgtagtccaggaagacgccgagccggtcgaggtcgtcgcggggccgcaggcggctgcgctggccgtcgtggaaggcccagtactcaaggtcgtagcgcttgaggcaccaggactggcggttgcagcccaggcgggcggcggccgaggccccgcggcgccgaagggaggcgtaggccgcgcccacccaccagccggcgcccgcctcctgcacgtcaacctcccagtagtggcggccggtggcgaagcagtcacgagccagcacttgccagagcgcgtcgaaccgcagcacgggcacgggccccaggctgcccagcaggccgcagcgcaccgtcaggcgatcggcggacaggcgcaggcgcgcgtgcatcgtgtcaggatccagcgtgggcgtgcgcgcgtctgcagggggcgagacaagggacgcacctggtgggcggggccagcgcggcgccccgcccccgggaacccaccaacgcacgtgcaaatcacaaaatgcgaagcgcggaaatggcccaaggaaggggtgacagacccctttaaaccgcgactgcccctggggcggggtcttggggaaaggggaagaagagatcactctgctgcacatcccttatactgtctgtattttgtgccgtgaaatttgttgccaattaatacaaatttaattaaaactaatcctatcactgttaacattagggtgtgtgtacttcctatctttcccctccccttgctgctttatagcttttctttttcttttttttctttttttgaaacggagtctcgctctgttgcccaggctggagtgcagtggcgcgatctccgctcactgcaagctccgcctcccaggttcaggccattctcctgcctcagcctcccgagtagctgggactacaggcgcccaccaccacgcccggctaatttttatagcttttcttaatattggtgtcacaccatacatgacgttaggtaatctgctttttaaaattgattgatctacttgtgaggcattttgacacatcataatatcctttcacaagagcattttagtggagattctaaaattttgatgtttggacgcataacttagtcctccgtttaaaaagcttttgaaaccactaatacaattacatttttacgtatctgattgcttctgtagaatatactcctaaaacaggaattgctgggtcaatgggtatttttttaaggtctttgatacatattgcaaaactatcctccccaaagtttgtagtgatttaaactctcattaacatttctctttgcattacaccatgtatgtacacatgaagttttttttgttgttgttgttgttgttttttaagtctggatcacagggtatgtggatattcagctttcataaacaaggccaaacagttttccatggacatttggattgtttccgtgttgcctattgtgactaatgttgctataactgtaaacgtgtaacagagactgagttttctaagaaaaagagcatttttctaagagaaagagaatgaattatttttaagattttccccctttttctcctgtctcccacttcctacttagctctttatttttattttttttaagatggagtttcactcttgttgcccgggctggagtgcagtggtgtgatctcgactcactgcaacctcggcctcctgggttcaagcgattctcctacctaaggctccctagtaactaggattacaggcacctgccaccacgcctggctaatttttgtattttcagtagagacagggtttcatcatgttggccaggctggtcttgatctcctgacctccggtgatccgcctgcctcagcctcccaaagtgctgtggttacaggtgtgagccactgtgccctgcctctacttagctctttagaaatgtaattataaccattaccttcccttcaccagatagtccctacagggcaaacttatctacctacttagagggtctagaaccagaactttctcccaccaggagattgccttaagagacaacagtcaatttacaacataaagtatgccttcaacagaactcttccacccggacagcatctcaagacaacggccacattacaacctagttctgccctc

SEQ ID NO: 95465 - DNA, 113255 bp, Homo sapiens
ggccaggatggtctcgatctcttgacctcgtgatctgcccgcctcggcctcccaaagtgctgggattacaggcctgagccctgccaattccttttttttttggagatacagtcttgctctgtcgccctagctggagcgcaatggtgcgatctcagctcactgcaacctctgcctctggggtttaagcgattctcctgcttcagcgttctgagaagctgggattacaggcatgcgccaccacgccggccaatttttgtattttttgtagagacaggatttcaccatgttggtcaagctggccttgaactcctgaccgtgtgatctgcccgccttggcctcccaaagtgctgagattacaagtgtgagccaccgcgcctgacctctttcttttttttctctttgagacagggtctcctctatcaccaggctagagagccttctgggctcaggtgattctcctgcctcagcctccggagtagctctgattacaggtgctcaccaccatgccatgctaatttttgtatttttagtagagatggggtctcgccatgttgcccaggctggtcttgaactcctgggctcaagcaatctgcccgtctcagactcccaaaataccaggattacaggtgtgagccactgtgcccaggcacaagaggtcatttttgatgaataaatgcacattttgttaactaatgagtgatttcatattccaaggaagatctggagatattactgaaaaggtgtttaacttgcagtggcaactgaagtcaatgtattttacattttcatgttctggacttgggtgagttgttatttcaagccctcatctttgagtaaaagagaagaatccacctgtaatcccagccactcaggaggctgaggtaggagaatctcttgaacctgggaggtgggaggtggaggttgcagtgagccaagattgagccactgcactccagcctgggtgacagggcaagactccgtctcaaaaaacaaaaaaaaaaaaaaaaaagaagaaggccgggcgcagtggctcatgtctgtaatcccagcactttgggaggccaaggtgggcagataacgaggtcaggagatcgagaccatcctggctaacacggtgaaaccccgtctctactaaaaatacaaaaaattagcctggcgtggtggcgggcacctgtagtcccagctactcaggaggctgaggcaggagaatggcgtgaacctgggaggcggagcttgcagttagcggaaattgcgccaaaaaaaaaaaaaaaaaaatccattctcctctgggatgattcccctcccccacttcccgttccctcctctcccctcccctcccctgccctgccctctcctccccttcttttttttttttttttgagatggagtctctgtcgcccaggctagagtgcagtggtgtgatcttggctcactgcaaccttcgcctcctgggttcaagcgattctcctacctcagcctcccgagtagctgggactacaggtgcttgacaccacacctggctaatttttgtattttaatagagacggggtctctcttttttttttttttttagagacagactctcgctctgtcgcccaggctggagtgcagtggcgggatctcagctcactgcaagctgtgcctcccgggttcacgccattctcctgcctcagcctcctgagtagctgggactacaggcgcctgccactacgcctggctaatttttttgtatttttagtagagacggggtttcactgtgttagccaggatggtctcgatctcctgacctcgtgatctgcccgcctcggcctcccaaagtgctgggattacaggtgtgagccactgcgcccagctgagacggggtttcaccatattgaccaggtctcgaactccatattgaccttgcgatcccagagaaagtgctgggattacaggcgtgagccaccgtgcctggttgagacagggtttcaccatattgacctggtctcgagctcctgaccttgtgatttgcctgcctcggcctcctaaagtgctggaattacaggcgtgagccactgcgcccagcctgtagatgttttttttttaaagtctggaagccaagggtgtcaatgcagacatggggccaaggtcccaggggcagttcattattaagaactgtgctcttaattgagacacctggcaaattttgtattgctttgtagagatggggtttcacaatgttacccaagctggtcttgaacgcctgtcctcaagtgatctgccagcctgggcctcccaaagtactgccattataggcatgcatgagctaccacaaccggcctgtttttcttttttgagacggagtttcgctcttgttgcccaggctggagtgcaacggcatgatctcagctcaccgcaacctctgcccgctgggttcaagcgattctcttgcctcagcctcccaagtagctgggattacaggcatgcaccaccacacccggctaattttgtatttttttagtagagacagggtttctccacgtcggtcaggctagtcctgaactcctgacctcaggtgatccgcctgcctcggcctcccaagtgctgggattacaggcgtgaggcaccgcgcctggcccggcctgtttttctttacactattgcatattagtgtgattagcataaaagacaattagagaacagtcataccatccactccatgggcagcaaccctgcctcctccatgcattgctgcagggtattcctagctcaatgcttagcatttggagagagcataagaaatactatttggccgggcgccttggctcacgcctgtaatcccagcactttgggaggctgaggtgggaggatcacctgagcccaggagtttgaaaccagcctggacgacatagtgtgactgtctctacaaaaaattttaagaaaattagctgagtgtggtgtcccacccttgtagtccaagctactcgggaggctgaggcaggaggatcgcttgagcccaggaggtcgaggctacagtgagtactgatcgtgccaccgcagtccaggctggatgacccagcaagcctgtgtctcaaaaacaaaaacaaaaaaacaaaaaaataactacttgaatgaatgaggaatcgagttcagatcccacttctacttgctcacttactgtgcactattcaataacactagctgaggatcagagagctagcaggtgggctacctgctgtcatgattcctcataaccaaacagtggaagtgggagccattattgtttctggtgggttttttttgttttgtcttgttttgtttttgagacggaatctccctctgtcaccaggctggagtatagtggcacgctcgactcactgcaacctccgcctcctgggttcatgcaattctgcctcagcctcctgagtagctggcactacaggcacgcgccaccacagccagctaatttttgtatttttagtagagatggtgtttcaccacattggccaggatggtctcaatctcttgacctcatgatccacctgccttggcctcccaaagtgttgggattacagacgtgagccactgggcccagcattttttttttttttttttttttttgagatggagttttactctcgtcacccaggctggagcgcaatgacatgatcttggctcactgtaacctccacctcctgggttcaagaaattctcctgcctcagcctgccgagtagctgtgattacaggcacctgccactatgcctggctaattaatttttttgtatttttagtagaaacggggtttcaccatgttggccaggctggtctcgaactccttacctcaggtcatctgcccaccttggcttccgaaagtgctgggattacagatgtcagccaccgcacccagccttattgtttgtttcacaggtgaagaaagtgaggtgtagatgctctggtaaacctgcctggtattacccatgcatcacccaggtagtagaaatggagtcgtgttttaaacccaggtccttctggggcctggcttggtggctcatgcctgtaatcccagtgcactgggaggctgagccaggaggactgcttgagcccagtagtttgagaccagcttgggtaacacagcagacctcagctctacagaacataacagacaaaaaaaaaaaaaaaaaaaaaaagctggtggtggtggcatgtacctgtagtcacagctatttgggaggctgaggtggatcccttgagtccaggagtttgaggctgcactgagctgtggttacaccattgcactccagcctgggttacagagcaagaccctgtctctaataaaacaaacaattaaacaaaaacccacccaggtgaggtggctcacgcctgtaatcccaacactttgggaggctgaggtgggcggatcacttgaggtcaggagttaaaaaccagcctggccaacatggtgaaactctgtctcaactaaaaatacaaaaattagccgggcgtggtggcggacgcctgtagtcccagttactcgggaggctgaggcaggagaatcgcttgaatctgggaggcagaagttgcagtgagctgagatcgtgccacctcactccagcctgggcaatggagtaagactccgtctcaaaacaaacaaacaaacaaacaaacaaacaaacaaacacacaaaaaagaaaacacacagaagaggccaagaggctcagggccttcactctcggaggaaggtttctctctttcaccaccagcctgtatgcattcaaacgtgttctttgcaacgacgacttccgtggctgccctatttaaaatgtccatgatcctcccagtgttcacctcacactgtactatttattttttttgagacggaatttcactcttgttgcccaggctggagtgcaatagtacgatctcggctcactacaatctccacctcctgggctcaagcgattctcctgcctcagcctcccgagtagctgtgactacaggcgtgtgccaccacgcccggctaattttttgtatttttagtaaagacggggtttcaccgtgttagccaggatagtctcatctcctgacctcatgatccaccagcctaggcctccctaagtgctgggattacaggcatgagctaccgcgcccggctaatttttgtatttttaatagagacgggtttcaccatggtggtcaggctcgtttctaactcccgacctcaggtgatccggccgcctcggcctcccaaagtgctggattacaggcgtgagccaccaagtccggcctctcatactgcactattttgcttattaatcttgcttcttgtcctccttccccactagaccgagggctccacggcggctgggacacagtagcagatcaataaatatttgctaagctaattaatggcacttgggaagttttgcagagaaggcggccacggtcgggccccgccttgcctccccwaataggcctcgccgccccaggtcagggatcaaagcggttcccaggcgcgcccttggcccgcgggaaaccactgcccggtcttggtccaggcggcccgtcctacggtccagggttcctatttccgagcctcagggacctcctttccccacggaccccacggccaccgggatcccattctccagttgccccatcgtcaccgcggccgccgccaccgccgccgcagtggcgtccgctctgcgcatgctccggggcgtcaagacgcgaggcgtgcagaaggcgaagcgtgcgcaggcgcggggccatcgcggcccgagtggggcggtgcatcggacgcgcgtgcttcctccgggccacgcccacccccgtccgcccagggacgggcgcgcacgcgcgccgggagcggaagggcgggctggcgcgcgcacgaggccgggcaggcggcggaagctggagaggccgccgcggtgctgagggggaggggagccggcgagcgcgcgcgcagcgggggcgcgggtggcgcgcgtgtgtgtgaagggggggcggtggccgaggcgggcgggcgcgcgcgcgaggcttcccctcgtttggcggcggcggcggcttctttgtttcgtgaagagaagcgagacgcccattctgcccccggccccgcgcggaggggcgggggaggcgccgggaagtcgacggcgccggcggctcctggtaaggaacgcgggccgcgggggcagcgcggcgcggggccggggagggcggtttgaatggagccggggcgccgaggggggagggggctgccggcgcgccctgtgcggggccggggtacggcggcgcccgagggtcaagaagcccagccggcagccgcgcgcgtggggaaggccacagtgtcgcgaggccgtggcagcggcggcccccgcggagcggcggggtgggtggggggcccgggccgcgtggaggccgcgcgatcctctccgcgcgcgctctcgccggggtcgccggacaaagctcgcccccctcgcccggcacccctacagtcgccctcccaattacagcggctgcaacaataggcaggcgttggggcttttctggctgcgtggtaacgggtccgacccgaatgttgcgtttttggcgaagctgcgatcggggctcagccaaacctccagatatgtccggcgtcggccggacacgggcattagcggtccccttgggctagccgacctcaaattgtcttaaaaacgtgtcattccagattttcaaggaaaggtaaaggactcccccgatgccttgcagttagtgacttcaaaatgtttgcccgaattggggttggggatggggtcggcggcaagtaggggagcacggaggaaatcctttgctgtgtaaaagcattgcttttcttttgcatccttttttctccttcccaattggtttttcagattaaggcttttattttcaacgtggaccttttgggcgagtgttttgtcccgatcttgaagataccagtcttgattttttttttttttttttttggtcagtgactccttggggaaagtagcaagggaataagcggaaaagccgcttcgcaggaatttgaagcaagttttcagtttggattgataggctgcattcaagcttgattcctggtgctgtcagtcacttagcacactgtcactttagggaagtggcttaacctctctgaacctcttagttttcctcctttgtgaaagctcctttgtgaaagggggtaatctcccaaatggaattggtgaaagcctgtaaaatggttcctcgcaagcgggaagcactattgtaattgtctggtccaatctccctcattgttcagcagataacttcttgaggccctactaagtgttggatggtcgggggttggatcctggagcctctgcagtcttggaggggagcgggtggtaaatgtgggaacaaactctcttggcctatcgtttattgctctgaacctgcactgtgagagggacacagcggacaggcaggggatcggtggtagccagagatcacgggggctgcttggaagagggggcctcaaaatcagggagggtgtgtaggattgtattttgtttttgaggcagagtcttgcctgtcgcccaggctggagttcagagtcccaatctccgctcactgtaacctccgcctcctgggttcaagcgattctcctgcctcagcctcctgagtagctgggactacaggcgcccgccaccacgcctggctaatttttgtatttttagtagatatggggttttaccatgttggccaggctggtctcaaactcctgacttaaggtgatccacccacctcggcctcccaaagtgctaggactacatgtgtgagccactgcgccaggattgtattttgactttccctggccacctcggactagccattgttcccctcagctacattcatacatcaacttggtcctttccggtgtagctgtcacccccagcaccgtgagagctggggttgtgtctgcctggctggccccacagtaccctgggcctgacacatagtaggtctttagcgaacttatgtggattgaatgagggggtcctgtggaagatcgcgtgaccatctgtgtaaaaggcttggtgcagggccaggtgcagtggctcatacctgaaatcccagcacttggggaggctgaggcgggaaaattgcttgaacccgggagtttgagactaacctgggcaacatagtgagacctcatctctacaaaaaatacaaaaattagccgagtgtggtggcatgcaccggtggtcccaactactcaggaggctgaggtaggaggactgcttgagccagagaggtggaggctgcagtgagccattcttgtgcccctgcattccagcctgtgcaccagagtaagactgtctcaaaaaaaaaaaaaaaaaaaaagaaaaagaaagcttggtgcaggactgggggtggattgtaagggatacaggttagttgtttgaacagtttttgcactttccaagccattgtttcctgaacctcagttgtcctcatctcccctacaaagtgtggggtggtggttagcgtggggtggtggtaaggagtactcattctggaatcagacctcctgaattcacacccagctctctaaatcgtagcttaacctcaagcgaggcgcttagcagtagggccccccacttgtgaaacaggtaggacgaggatgcccgaaacttcacaggcttcttgtgagggttgaatgaggtcacatgggaagccgctaacacactgctgcacctgatgcgtagtgaacacttgattttttttttttttttgagacggagtctcgctctgtcatccgggctggagtgcaatgcccctgtagtcccaagctccttgagaggctggggcaggaggtacaggctgcagtggaccatgattgagccactgcactccagcctgggtgacgaagcgagaccctgtctaaaaaaaggaataaaaattaattcatgcatagttaggaaagtaataaatggttttgcatgggccacctaaaatcattttgtgtccagccctttaggagacgtaaatgttgatcgtgcaggcttttgagcaggggaggtgatgtcatcagaattgtgatatagggcagtgcagtggtctctaaacttcttgtcagtgaggagcattccaacatatgtgtatttatttacaatttatttgtgtacctttgcttctccttgggaaccctcaaaacaccaggagataaccttagaccattccatgttttggctgtttgtgggaggtgggagcatgggagggactagggttttgggcagatgtctggtggaactttctttctttctttcttttttttttgagacggaatcttactcttgttgcccaggctggagtgcaatggcacgatctcgtctcactgcaacctctgcctcccgggttcaagcgattcttctgactcagcctcctgagtagctgggatcacaggtgtgcaccaccacacctggctaagttttgtatttttagtagagatgggatttcatcatgttggccaagctggtcttgaactcctgacctcaactgatccacccaccttggcccttggcctcccaaagtactgggattacaagtatgagccaccgcgcccggcctctttttttttttttcttwtgagacagagtcattctgtcgcccaggctggagtgcagtggtgcgatcttgactcactgcaacctccgcctcctggtctcaagcgattctcatgcctcagcctctggagtggatgggactaaggacgtgcaccaccatgcccagctaatttttgtattttagtagagaccgggtttcaccatgttggccagaactcctggtctcgaactcctggcctcctgtaatctgcccacctcggcctcccaaagtgttgggattataggcgtgagccaccgtgcccagccagtctggtggaactttctatcagtaaggaaactgaggcctagggttattttctttccacaagggttgtcaagtcaaccacctgggtttgactcctggttttgtctttccrtccctcggtcatcaaggctgccatggcacagaaggacccattcatggtgcctgtagacagaacacaatgtgaatagtgccccctggagttgtgcaagaaatgacccagccactcttccccatttatgtggcgaacaagcatgcattgagcgcctgccatgtgccaggcactgctggggagctggggattccatggggaacaggcagacaagggtcctgttcttagtagctcacaccccactcttgacttgcaaagggggacagtactagtacccagcttgtaggattgctgcaagagctgaacaaccagtgacaaatgcgaagtgcttagaatggtgcctggcacatagtgctaaacagttgttagtgctcatcatttattaggattcctgcaacagcctggtgggatgacacagataatatactttttcctctagtcataagttctgtatgtttcaaagtggtagcaaaggagtcagctcctccattttgtccttaatggctgcacattgtttaacagcagggatgcattctgaggaatgcgttgtgagatgattttgtggttgcgtgaagatgatagagtgtgcttacacacgtctagatggtggagcctagtccacatgtaggctctgtggtatagcctattgttcccaggctatacacctgtacagcatgtcactgtaccgattattgtaggcagttgtgacccgatagtatttgtgtatctaaatatatctaaacagaaaacgtatgggaaaaatacagtattatgatctttaaaaaatttttctaattagacaattcaaggaggaaggtataatcttatgggactattgtatatttggtccatcattgaccaaaatgttatgtggtgaagaaaaccatgctttgaaatttcaccataaggcattggaaaagggagagtgtgtttagtggcatggtttttttttttttttttttttttttttttgaggtgaagtttcgctcttgttgcccaggctggagcacaatgatgcggtcctggctcactgcaacatccgactgcagagttcaagcaattctcctgcctcagcctcccgagtagctgggattacaggtgcccgccaccatgcctggctaattttttgtatatttagtagaaacggggtttcaccatgttgaccaggctggtcttgaacttctgacctcaggtgacccacctgcctcagcctcccaaagtgctgggattacagacgtgagctaccgcgcccggccaggtttttaaaaatatcaaatgttcagccgagtgtggtggctcatgcctgtaattcccacactttgggaggcccagcagggcaaatcacttgatcccaggaatccaagaccagcctgggcagcatggcgaaaccccgtctctacagaaaagttaaaaaattagccaagcatggtgttgcacacctgtagtcccagctacttgggaggttgacgtgggaggatcaagccgaggaggtggaggctgcagtaagctgtgatcgcaccactgcactccaacctgggtgacacaacaagaccctatcttaaaaaagccgggggttgggctgggcgcggtggctcatgcctgtattcctagcactttgggagccgaggcgggcggatcgcctgagctcaggagttcaagaccagcctgggcaacattgtgaaaccccgtctctacgaaaatacaaaagaaattagctgggcatggtggtgtgcgcctgtagtcctagctacttgtgagactgaggcaggagaattgcttgaacccgggaggccaaggttgcagggagccgagatcgtgccgctgcactccagcctgggcgacagagcaagactacgtctctacaaaagaaaaaaaaaaagccgggggttgggaaggataacagctgctggaatactgggggaaggtatgagagggaacaggtcagaatgaagcctgaggctgaatggagcttcaggtgctgccaccctcataggtgtcaaccctaaggagacatagcggactcattagtatgcccagtgatttcttgattgaagttttctgttaactgcatcctaaggacattaatcattaatttttcagggtgtgggattgatgggcatgtgatttgtggcctcaactcttcttcatatatgggaaagggcctggatggaagtgccaggtgtagctgggtttgttgttacagggcagagagaagggacacattgatttccctccaattccctcagggaagggggctttcttgtttttattttattttattttattttattttttgaaatggagtcttgctctctctctgtcgcccaggctggagtgcagtggcacgatctcagctcactgcaagctcccccttccgggttcacgccattctcctgcctcagcctcctgagtagctgggactacaggcgcccgccaccacgcccggctaattttttgtatttttagtagagacggggtttcaccatgttagccaggatggtcttgatctcctgacctcgttatccgtctgcctcagcctcccaaactgctgggattacaggcgtgagccactgcgcccgactggaagggggctttctttagaaaataggtaaatgttagtagggtggaaaccaaccctggcccctttcaaatgtgtggtttttttttttttttttggagacagttgtactcttttctcccaggctggagtgcagcggtgtgatctcggctcactgcaacctctgccttccaggttcaagcaattctcctacctcagcctcctgagtagctgggattacaggcgtgcgccaccatgcccggctaattttgtatttttttttaatttttatttatttatttatttttttgagacggagtcttgcttagttgcccaggctggagtgcaatggcacgatcttggctcactgcaatctccgcctcccgggttcatgccattctcctgcctcagcctcccgagtagctgagactacaggcgcccaccaccatgccctgcgggggtttcaccatgttagccaggatggtcttgatctcctgacctcatgatccgcccgcctcagcctcccaaagtgctgggattacaggcgtgagccactgcgcccggccagtaattttgtatttttagtagagacggggtttctccgtgttggtcaggctggtctcaaacttctgacctcaggtgatccgcctgccttggccttccaaactgctgagattacaggcatgagccaccactcctggcctcaaatgtttttttaagtcccagactggtttccagagctttgcttttggggactctgttacctccctaaaggggcatagcttcatttatgtrtgtggacacttgtcactgtgaaccgttttgctctgtgtgcagccagctgtgagtgtgatagagtagcacgggccccgtttttaatagtgatcgactttaaaatggttctttgaggaggtgttttttttttctttccactttttatttttttagagacggagactcgctgtgttacttaggctggtctttaactcctggactcaagtgatcctccagcctccacttcctgactagctgtgattacaggcgtgatccactgtgctagctcttgggagttttttaagttttctctttgccactggcaagtcacgccccagtggctcaggaagcaggtggctgatgtgacagttgctgctcacctgttccagtgggagacttgagggggagggtctgctgtgtgcgacccatcttgctccgaaagtcccagtaaaggggcatagtggatgtctcattgtgcccagggagctgaaactgcccctgtgatgatcaaatgtgattctggcacagcctggactggctgggcacctgaaggccttgcctgcctcctggaggcatctcctgggtgcctgtgggagtggctctttacttgcccttcctcttgactctgcccttcctcgaccttcaaggttctcatcctattccttttgatcctcggcctgaatcagttactcaggccctggagtcaaagagacttgaggcgggattctgttctgcatggcttaacctctttgaactcagaattccgttttcctctcagaatctccctggcctccaccctctacctcaagaaccaggggctgaaccccggccctgcctgtctttgccaagccttgctctagggcttggtcagcctcgaggaaggggggccttgttatgtttatttaaaaatttatgttttaggttttactttcttagaagtggaggtcttgatgttatctcccaggctggtcttgaaccccttggctcaaaggatctgcctacttcagcctcccaaagtgctgggattatgggcgtgagccaccacgcctggcgcctttttatatttctttcttttttttttctttttttgagacagagtttgtctcttgttgcccaggctggagtgcaatggcggggtctcggctcactgaaacctccgcctcctgggttcaagcgattctcctgcctcagcctcccgagtagctgggattacaggcatgcaccaccacacctggctaattttgtatttttagtagagacggggtttctccgtgttggtcaggctggtctcaaactcctgacctcaggtgatccacctgcctcagcctcccgaagtgctgggattacaggcatgagccactgcacctggccccctttttatgtttctaacagcacgtcccagccgagaccctggtgttcacccttgcctcatctcttgccctcacttgcacatccattccatcagcatgtccagagaaattaaagtcattatcagaccgtgccactcccgtgcctggaacattctagcagctccccactgcactggatgctcctggaacccctttactgtggccctcaaggcctgtgacttctcccctatgccccacctgtggccgcacccacttgccctctgaggtatgatatggaatatatttggtctttgcgccacatgtcataggagtgataggtgtgtcttttaaaattcataatgagccccttttgatcacagctgagtttatgcttatgaggtgatttaggatggggctcctagatagcccaggatggggctggttaccagaaagaccaagtgcttagagggtggcatgtacggaggggccattgaagctgtctgtattgcttccatctggttgaccccgagtcgtatcygttataataaaccattaatgggaagtgaagtgcctgccttagttctgggcgctgctttagcaaatcaatcaaatcgaggagggggttgtgggaattcccaatttataggtggctgggcagaagtactggaccctgggatgtgcaaatggcatttgtagtgggagcagtcttatgggacagctctttttcttttagagacagagtgtcactctcacccaggctggagtgcagtgatacagtcatagctcactgcagtgtccagctcctgggctcatgtcatgctcccgagtagctgggactacaggtgtgcaccactgccaggcttagctaatttttaaawtttttgtagagacagggtgctatacttcctaggctggtttcaaactcttggcctcaagcagtcctcccactttggcctcccaaagcactgtgcttaggtgagcccactgcatctggccgataaagtccttaacttgtgggagayagagtctgaattgagttaaattgtaggacacccagctggtgtttggagacttggagaattacttggaaaagacccacgcatctggtcacagaattgttctcggttatgagagtatagtagaagaaaactggttttctctgagttggtgtcaaaagtgctgtgtgagagtgtagagaaacggagtgtgggccaggcacggtggctcacgcctgtaatcccagcattttgggaggctgaggcgggtggatcacctgaggtcgggagtttgagaccatcctgaccaacatggagaaacctagtctactaaaaatacaaaattagctgggcgtggtggcgcgtgcctgtaatcccagctacttgagaggctgaggcaggagaatcacttgaacccaggaggcrgaggttgcagtgagctgagatcgcaccattgcactctagcctgggcaacaagagtgaaacttcatctcaaagaaaaaaaaaagaaacagagtgtgttttcccaccttccctgctccagccacactggctgacttgctgtgccttggaatatgccaagcacagtccagggcctttgcacttgctgttcctctgtggtagataaataaccacatggtgcccatgtcactacagatctctgctcagacatcttcatcactgaggtgtcccaggctaccatagaaggagtgcttctcatctgttaaccctgcgaaccctgcttgattagatttatagcacttccaccctctatgtgacattgtgtcttttttttttttttttctctttgagacaaggtcttggtctgtcacccagcggggagtacagtggtgcaatcatagctcatggcagtctggaccctcccaccttggcttcccaagtagctgggactacagccgcatgccagctaatttttgtatttttcgtagagacgaggtttcaccgtgttgcccaggctggcctcaaattcctggcctcaagtgatcgacctgcctcaacctcccaaagtgctggaattacaggcgtgagccaccatgcccaccctgaatactttttttttttttttttggaggggggagatggagttttgttcttgtcgcccaggctggagtgcaatggtgcgatcttggctcactccaacctccgcctcccgggttcaagcgatttcaattttcctgcctcagcctcctgagtagctgggattacaggcgtgcaccaccacgcttggctaattttttttttttttttttgagacggagtctcgctctgtcacccaggcttgagtgcagtggcacagtctcagctcactgcaacctccgcctcctgggttcaagcgattctcctgtcccagcccccacaccgagtagctgggattacgggcgcctgccaccatgccggctaatttttgtatttttagtagagatgagttttaaccatgttggccaggctggtctcaaactcctgacctcaagttatccactcgtcttggcctcccaaagtgttggaattacaggcatgagccaccaagcctggtcctaatttttttattattagtagagatggggtttcaccatgttggtcaggctggtctcgaacccctgacctcaggtgatccacctgcctcggcctcccaaagtgttgggattacaggcatgagccaccacgtccggccctgaatacttttttttttttttaatataacacttccactttctatgtgacattgtgtcatgtttggctatttctgtcactctgctgtccactcctccaggtaggaattgtgttgttctctgccagatgcctggtgtttggaaccagcttggtgcattcagcgctgttcgtatttgggggtagtcatcagtaagtcctctgctgtggcggtggggaaggcctgtcacgagtgacactgggcaggtatggattctgcatctccctgcccactcttggcctttgcatgcctctgttgtggggactcctcttgccgtctccacacagtgtcactcctcacgctcagtgttgcgtatatagctgataacacagcagacccggtggtggcgcaggacatccatccagtgggcctcggccagccgaaaagaaagaataggggccgggcacagtggctcacgcctgtaatcccagcactttgggaggccaaagtggacggatcatcggctcaggagtttgagactagcctggccaacatagtgaaaccccatctctacaaaaaatacgaaaattagctgggcatggcggtgtgcgcctgtagttccagctacttgggaggccggggcaggagaattgcttgaacccgggaggccgaggttgcggtgagctgagattgtgccactgcactccagcctgggtgacagagccagagtccatctacaaaaaaaaaaaaaaagaatggggttattgatgttccacagggagcgtgggtcaggatggatttgtgacacttgatgcggttactctgcgtgttatgtttctgctgggtcacattgtcacatggagacatgatcagaagagcttgaaaaacatccatctaattgatagctaggatagcatttgcaggcttgcagtgtagacaccacacgtccctgtggggttagaggacactcccctaaggcagagaaccgtcctggatgcttttaggtcccttgggtaggtgctcttaagcggttttctttttttttttttgagacggagtctcgctgtcacccaggctagagtgcagtgatgcaatcttggctcactgcaagctccgcctaccaggtttacaccattctcctgccttagcctcccgagtagctgggactacaggcccccgccaccacgcccagctaattttttttttttttttttttgagacagagtcttgctctgtcacccaggctggagtgcagtggcatgatcttggctcactgcaagctccgcctcccgggttcacaccattctcctgcctcagcctcccgagtagctgggactacaggcgcctgccaccacgcccggctaattttttgtatttttagtagagacggggtttcaccgtgttagccaggatggtctcgatctcctgaccctcgtgatccacccgccttggcctcccaaagtgctgggattacaggcgtgagccaccgcgcccggcctggaggttttcttatagaccaccgaggggaacattttgttttgtagttcacgcatagtaaacggggctggctctgcggaagccatcctgcccattgctgttgttccgcccaagcctctgccataacctgactcccacgttggtctgctgctgaaatgtgtccgtgaacaaatttccccaagccccaaaaaacacaatagcagatatcctgggaccaaacttaaatataatgctagtttctcatgcaaggtgaaaacaaccaccataattccaacaaacagatttccaagggatccgattgctggttagcaacctgccctgcctggggctggtcaccgcagtgctttaagacaaaagctaggggtggcgtgaaagaagagaccagacctcttctcttcctcaagcagtctccttccacatttgaacgtcaacagatgtttctattttagrtgataattttgatgaagttgaaaataatgagaacatggtagttctcacatcctttgatctttctcttttatttccacaaagacacttcctgggcatttcttgtgggtatttatttcatgggtattctgatttaggctttttttttttttcttggaagtttttctttaaaaatctgaatataaaaagtaatagatggctattgtaaaaaataaataaaaagcgccagacatctgtgatatggaaagggtaagttcctcatcacatgccatcagagagagctactggctgtgctgacagcggtttgtgcatgttttctttggggtaatttctatgcatggattaacatgcatatatatatatatatatatatatatatwttttttttttttttttttttttttttttgagacagagtcttgctctattgcctgggctagagagctgtggtgcgatcttggctcaccgcaacctctggctgctgggttcaagtgattctcctgcctctgcctcccaagtagctgtgattacaggtgcccaccaccacgcctagctaacttttgtgtttttgtagagatggggtttcaccacgtttgccaggctggtctcgatctcaggtgatccgctcgcctcagcttccgacagtgctgggattacagctgtgagacaccatgcccagccatatgcatatatagttattcttttttttttttttttttttttgagacagggtctctgtcgctcaggatggagtgcagtggcgtgatcttggctcactgcaacctccgtttcctggttcaagtgattatcgtgcctcagcctcctgagtagctgggactacaggcatgcaccattacccctggctgacttttgtatttttactagagatgggattctgctatgttggccaggctggtcccgaactcttggcctcaggtgatctgccttccttggcctccaaagtgctgggattataggcattaacaccatatccaaccttacttttttttttttttttttgagtgtttctctgttgccaggctggagtgcagtggcgcgatcttggctcactgcaacctccacctcccgggttcaagcgattctcttgcctcagcttcccgaatagctgggactacaggccagctccaccacgcccagctaatttttgtattttagtagagatagggtttcaccatgttggccagggtggtctcaaactcctgaccttgtgatccgcccaccttggcctcgcaaagtgctggaattgtaggcgtgagccaccacgcccagcctctcaattcttttttgatgtgccaagacttctgcagcgtgggttgtgtgggggttctgattgctgggcaattgaggagcttctcaagaaattgaggcaatatggccacaccacttctagaccctttggcccagggaaagggttaacctcctggacttttaactgagtgttttacatcttagcttttagattcttgtgccagagtagtttcacttccggtcattccttctggctgctggcctggattcccaggctctgttttctccttgtggaggccccggcagcacccgatccaagggccgcacacatctggatttggcttccacacgctgtactaactattcttgcccttttggcccctgaatcccctcatcctttgctttttccacctgagtaggtgtggcctcctggtctgcaatggatttcattgctgcgtgaatttcccctgctagtgacttatcattgagggccccattgcaggactctaagcggcaccgtgtaagacaccttagggacgacctttggccaccccaggactttgctgaaaatgccaaatccttcgtttcctgtatagaagggcagggatgattggcgatggggtaagaaggggtagagagagaggtgttccttgtccttagacacctttcctggccgtgctcgtttggccttcccgtgtagacatctcgccggagcaaggtgcacccagccccacaccccatccagcttctacagggctggcctcaccccagcccttcagggagggtgagctggccaggaggaggttgagggctgagaacaacaccatgcttatggctgtgggagcaaggagggataagagatgtttgtgggtcaggcactgtggcttgggctaggtgcggtggctcatgcctgtagtcctagcactttcggaggttgaggtgggcggatcacttgagcccaggtgtttgagaccagcctgggcaacacggcgagacctcatttctataaagaaatacaaaaattagctgggcatagtggcatgagcctgtagtcccagctactcgggaagttgagatgggaggatcacttgagcccagaagttcaaggctgtgagctgtgatggcgccactgcattccagcctgggagacagagcgagaccctgtctcaaaaaaaaaaaaaaaaktgggccgggcgtggtgcctctcatctgtaatcctagcactttgggaggccgaggcaggcggattgcctgagctcaggagtttgagaccagcctgggcaacatggcaaaaaccctgtctctactaaaatacaaaaaaattagccaggttcggcagtgtgcgcctgtagtcccagctactcgggaggctgaggcaggagaatcgcttgaacctaggaggcggaggttgcagtgagccaaggtcgcaccactgcgctaagcctgggtgacagagcgagactctgtctccaaaacaaataaataaacaaataacaagaacaaaattcttggcagccggccaaatctgtgtgcattgmttgccagggtgggcgtgtcatggctgacagcaggtcctggatcgcacctaggggtttgctgctctccagccagctgcttctacctgatgcgcgcccaagaggggaagccagtctgttgttcctgagcattgcggggcaggagtgttacctgcggtttgtgctggggggaggctgcgttacggactcgagtttttttttgttttgtttttgttttttttgagatgaactcttgctctgttgcccaggctggagtgcagtggtgtgatctcggctcactgcagcctctgcctctcgggttcaatcaattctcctgccccagcctcccgagtagctggcattacaggcatgcaccaccatacccagctactttttgttttttaagtagatacggggtttcaccaagtcggccaggctggtgtygaacttctcacctcaagtgacccgcccgcctcggcctcccaaagtgctgggattacaggcatgggccaccatgcccagcccatgactcagttttctcatttctgttcagggaaaggagcctctgcttcacattttgatgggagcatctgaggacctcatctgtgtgatgctcctagtgcgatacctttcacgtgctaagcagctgctcagtaaacctggggagagatggggcaccttggtttcaccagctgagcggctggcacttcctgcctgtgagtgatggttcgatgttccagcctgtggaggaggaggtggagccacagggaggttacccgtgaggcaggtggcaccgtggcttcacagtccatgttcagagtgtgggatgcatggcagtgagttccactgtggccttggccttgtgacctgaactcttccacttccctgtcatctgtcagctggccagcaggaccactgtagtccctgtgtggtggtgagggcccagtgcggggagtctcagttgttaccatcaagtaggctgaggcccctacctcctggctagatcttccttccttgccatttctttgtgactgagacatcctcagcagttgtaaatcacagggaggtgaaggcaagccacagtccccgctggatttgcaaatatcccttcccttcctctgtcagcatgaccttacggtagacgaggatttcttaaataggaccccagaaatgttaaacctcaaagaccaaacttgatgaactggccttcattagaattaagagcttctctctctttttttctgtttgttgagatggaggtttactcttattgcccaggctggagtgcaatgatgtaatctcggcttcactgcaacttccacctaccgggttcaagtgattctcctgcctcagcctcctaagtagctgggattataggcatgcacccaccacgcctggctaatttttgtatttttagtagagacgggttttaccattttggtcaggctggtctcgaactcctgacctctgcttgcctcggcctcccaaagtgctgggattacaggtatgagccatcacgcccggccgatactttctactttttaaaagtggataccggccacatatgtggtggctcgtgcctgtaatcccagcacttctggaggctgatgcaggtggatcaggagttcaagaccagcctggccaacatggcgaaaccccgtctctactaaaaatacaaaaaatatatatatatatatattttagccaggtatagtggtgcgtgcctgtaatcccagctactcgggaagctgaggcacgataatcgcttgaacctaggaggcggaggttgcagtgagccgagatcacgccactgcactccagcttgggtgatggagcaagactctgtctctaaataaataaataaatagatagatagatatctcaatagccagtaagcatacagaaaggtgctccgtgccattagttgtgagggacatgcaaatgaagaccataagaagatgcgattggacattggcaacattgttaaaagttgtaaggactgacagcagcaagtgttggggttgatgaagagcacctggaatgctgtccctgtgtgggaggtgggaccgtrtgtgtagatgatacaactattttggaaaactagcaaagctaagtttatgcctccctttataaccaccagtttcattcttggacacccaagaagaaccaatgcatgtgttcaccaaatgactctcatagcagcttgatttgtgctggccagaacctggtagagtacaatgtctatgaaaatgagaatgctcacataaaaagaacggatgactctcccagacatggtgaccctgtgtgattgtcttttttttttttttttgagacagggtctttctctgttgcccacgatcatggctcactgcagccttgacctcctgggctcaaacagttctccctactcagcctcctgagtataagctaatttaaaaaaaaaaacttgtagagacagggtcttgctatgttgcctaggctggtcttgaattcctggactcaagcgatccttctgccttggcctcccaaagtgctgggattataggtatgacccactgcccccaacattatattatttatatgttacatatattatatgttataagtatatattgtatattatataatatatgtattatagacgtgacccaccacacccgtcattttattggaagttcaataacaggtgaaaggaagccacagtgatagtcaaaatagtggtttccctgggagagtggtattgactgggggggcccaagaatgccttctggaacgtcaggagggatgtctgacgcagtgttcttcaagctgttcacctatgatcctgcgatcagggcatgtacaagtcagtgagagtaagcagaatcacacgctgctcccctcagtactgagctgaggacgtggagtcgctccacggctctccactttgtgctgcaagtcggccagtgcttgttcaagtgcaggcaccagcaacctcatcacaggctttggcactgggcgatactgctggggatggctttgcatcactcccgggctgttgggatcccctttactgtcactctgcacgtgtctgagctttcaatccggaaatgaatttgcggatgctggtggcacccgcgttcctgtttcactgcagcctgactctagaggcagcattttcaggaggagaggccattctaacaagcctctgtgaaaccccgtgcttctaaaaagcagacttgccttattcgggcacaaaatggttttttggggcagcatcttcagtgtactctgtttttccgttgacaaagttagcgctgctttgagttggagccgttcctggaggctgtgacggcatcgcatgatttgatggaagggagaggggagaagttctaatgctcagtgtaaagtacgattaggtggcatacgcctgtagtcccagctactcgggaggctgaggcatgagaatcgcttgaaccccggggacggaggttgcagtgagcagagatcatgtcactgcactccagcctgggcgacagagtgagactctgtctcaaaaaaaaaaaatgtacaatgaggagagctataatttcagtcacttcccagtgtatgctcgttggcttgtccaccttcagagagggaaaagatggtttgccctcaatgacctggatctttttctctttttcctctgagacagcgtctcgcccttttgcccaggctagagtgcagtggtgcggtcatggttcactgcagcctcaacctcctggactcaggtaaccctcccacctcagcctcccaagtagctggggctacaggcatgtgtcaccaagcatggctaatttttgtattttttgtagagatgaggttttgccatgttgcccaggctgatcttgaatttctgggttcaggccatccccctgccttggcctcccaaagtgctgggattacaggcgtgctggattgtattttgctgtcagtttcagtttatttgacttagaataaagaccttcaagtgaggaagaagctataggtccctgaatatcacaggatctatgaagtatgtggcagtcctgctgtcccttttcctacctcattgcaacactctgtggacctgagaagactgtggggacagaaggcccagaggggagcgccaaggagccagtgcctccccctgccctggccgtgcccacgttgctgggcttcccacctatggaggtagctgcaggcgcatcctccctgcagacatacccatggaccagaggcttcaggctccaaaatcagcatcttagtaacataaacgcaaggttcagactgttgtcacatggcagaggccagggcggcatctcataatcagacagatcctgtttctgtagcagaatgtgcraatatccacacggagcagaatcaggtcagattttgcctccagatgaatttccttgcagtaacacatttaggtttgtttatgtcaggggccatcttttcaggattggctggagtgccagccactggttcctcccctgctgagtttcctggtcctctctcctgctgttagccatgaaagtggaatgaggtcattttgagcctttcatctcttgtctaagaatatatccctatggctgggtgcagtgtctyacacctgtaattccagcactttgggaagtccaggctggaggatcccttgagccaggatcaacaagtgtttgagaccagcctgggcaacatagagagacccctgtctctacaaaaaaattaagaaaaattagccaggcatggtgatgcactcctatggtcccagctactcgggaggctgaggcaggaggacggcttgagcccccgaggtcaaggctgcagtgggctatgatggctccactgcactccagcttgggtgatagagtaagactctgtatacaaaacaaaaacccctacctttcaaattaaaactttttccgctagatcacctaatacaatgtaatttttggccaggaacggtggctcacacctgtaatcccagcacttcgggaggccaaggcgggtggatcacctgaaggtcagacgttcgagaccagcctggccaatgtggtgaaaccccgtctctactaaaaataaaaaaattggcctggcgtggtggttcacacctgtaatcccagcactttgggaggtcgaggcggttgggatcacgaggtcaggagttcaagaccagcctgaataacatggtgaaagcctgtctctattaaaaatacaaaaattagctgggcatggtggtgtgtgcttgtaatcccaactactcaggaggctgaggcaggagaattgcttgaacctgggaggcggaggttgccgtaagccaagatcacgccattgcactccagcctgggcaacaagagtgaaacttcgtctcaaaaacataaataaaacaaaaatagaactttttttttttttttgagacggagtcttgctctgtcgcccaggctggagtgcggtggcacgatctcggctcactgcaagcgccgcctcctgggttcacaccattctcctggctcagcctccccagtagctgggactacaggtgcctgccaccatgcccggctaagctttttttttgtatttttagtagagacagggtttcaccatgttacccaggatggtctcgatctcctgacctcgtgatctgcccgccttggcctcccaaagtgctgggattacaggcgtgagccaccgcgcctggccaaaaaatggaactttttaaatcaagagaattaaaaatgtttctacacttcttacagaatttatccttagaaccagaaatatgccggagagttcaggggcaaagagattcattccaaaaggcagcagaaacaagacagatttgcgacatgcttaaccagagaggggctatcaaaaaacccagggtgtcagagccaggaaatgcagtgtagcttttagaatttgtgttttaaagactattaaatgataagaattgccatgggtaagattatatgaaagcctagaatgtattgagaaatttcactgagtgtgggtgcgtcttcagccagcgagggccttcagccagcgaggcggagaagcctctttacagacacaagtatctttcctttcccatttgtctctgggtggttggaggacatccccttatgcatattagcatctaaaggaaaaggtgacgtttccaagtgtcagggaccaaaaagtgccattatttgtgtaatactttatcctttttaaacttaagttcatttattttaagggaaacttggtcttactactttcaatggaaaaccagcagtatttgccataaatatctgttttggctgaattgatggaatttcggttagaggcttgtttttttttttttttttctgagacagagtgtcgctctattgcccaggcaggagtgcagtggtgcgatccgggctcaccgcgatctccgtctcccaagttcaagcgattctcctgcctcagcctccggagtagctgggaccacaggcgtgtgccaccatgtccagctgattttcgtatttttagtagagatggggttcgccttgttggccagactggtctcgaactcctgacctcaaatgatctgcccgcattggcctcccaaagttctgggattacaggtgtgagccactgcacccggccagtcagaggctatttgagctatagtcctgttctttctgttaggaagataagcaagtggagagcagtgtgaagggtagaccagcaycccctgagacaccctctgccgtgatcaggaatatggcaggagcccctgaaggcccctgtggggcagtgcttgtctgtgagcgtggcccaccccttcytgggtagactgactgatcttgtgtgcctgagatgtaggacttcctctgagagtgatcatggagaaacggtttgggtggctggtggggaaggtactggcttcctgtgggatgtagattctgatgtgaccgtatgattgtcccttgctatccctgtcctgcctcgcccttggtcatgaaccccagactgaccaggactgtcttccagcaggaggccactgtctgcagctcccgtgaagatgtccactccagacccacccctgggcggaactcctcggccaggtccttccccgggccctggcccttcccctggagccatgctgggccctagcccgggtccctcgccgggctccgcccacagcatgatggggcccagcccagggccgccctcagcaggacaccccatccccacccaggggcctggagggtaccctcaggacaacatgcaccagatgcacaaggtagggatccctgygcccgcctcgcacctgcggcctctgcccactagggctgcaggcagcctctggaccgagggccttacttggaggatggggggaagccttcttgttggaggtgtcctgccttggctcagccccctaccccagggcccacggccatgaacagaaggttcagctcgtcagaccccagcctgtgctggcgcatgatctgggccccgcgggcacctgccccaccgtttcccgctcccttgctttctgcatgtgaaatttgggaatatcactacaaagttttcttttggtaatgaagaaaaacatccaaattcctaaaaaggcttttagccacgtggtttcccccgttctggctgtcaggctcacctgtgcagctcgcagagccgagcagcgggttccctttcctccaaggcgtgcccctcagccactgtctttacctcacctgcgctgagcagggccttcagtcagcaaggtggagaaggctctttatggtcacaagtctcttttgcatgtccctggatgtggttagaggacatattcccttatacatacagcatctgaaaggaaaggtcatattagcatccatgagaaaaggtgacatttctaagtgtcacgggccacaggaggtcccgggtggtagaagatgaggattgcttgaccacagtctcccatatgctcgtgctccactgggcgacatttattttgtgtacctgtctcgaggcctaagtaggtgtcagaaccttgccttggagtcatgctggggactggggagatgcgcgtcatcttcgggtggctgttctcggtgccctcgagcttctctcgggcagcgcatagctgcgctgccacctcacrttccacatgctgaccctgccttgccatggtccctctcgcagcccatggagtccatgcatgagaagggcatgtcggacgacccgcgctacaaccagatgaaaggaatggggatgcggtcagggggccatgctgggatggggcccccgcccagccccatggaccagcactcccaaggtacagaactgcgttccttcctgccttgtgtttgtcatactccagagtcctcagatcattttcctmccctgggttcccacaggatggattcagggagtacctaggatgatgtagccgggtgggtggcccgccacagagagctgtctggcatggcgtggctggtgctctgttctggccacctcgtctcggagcagccctggaaggggaaatgctggttggggggcagaccatgttcagcatgggtgatagaggagggctgtgcagggcagcagccccgtgccacccaggaacttactggaaatacagattcctggggcctgggactctgctttaatgagcccagcaggtgccttttctgtacgaggacaattgagaagtgatatggtgggtgactttccaaggccttgctgtcatcaggggtgggaagctcaggggctgcactgggaatggaagtgttgggggtgggcctggcgagcccgaggatgtggaccccgcctgtggacaggcaggcggaagccgggagagagccgtgatttcatgcacaggttctcagcattaaccagaagcaccttactgagacgtgggccaaaccaaatccaccaggtcggctgctgggctgaggtgccttcagcatgtgccctccaggtgcccctggttgactcaagagaaggatgccatttggctgtgccctgtctcagagtaggagctggtgtagggggaagaggctgtaaaaatcacagacatatgctgccgagtgaccagtgggctgrcctttctctgcaggttacccctcgcccctgggtggctctgagcatgcctctagtccagttccagccagtggcccgtcttcggggccccagatgtcttccgggccaggaggtgccccgctggatggtgctgacccccaggccttkgggcagcagaaccggggcccaaccccatttaaccagaaccagctgcaccagctcagagctcagatcatggcctacaagatgctggccagggggcagcccctccccgaccacctgcagatggcggtgcagggcaagcggccgatgcccgggatgcagcagcagatgccaacgctacctccaccctcggtgtccgcaacaggacccggccctggccctggcccyggccccggcccgggtcccggcccggcacctccaaattacagcaggcctcatggtaagactggctgccctggccctcaggtgtctcagagcgaatggctggggcgtgggtggcggggtggacagaccgtgctctgttgccgactgggttccccggtttgggattgcacrggcccatactgcacttctgggtgctcgggtggtgggggcagctaaatgctgcttccccagctccycgcttcccctggggccgctggttaataggtgtatctgctgtgtcccctggagccagggctgcccacggggctgggcgcaggcataaacctgggacgcactgttttctcttttgtttctccctacatgtaggtatgggagggcccaacatgcctcccccaggaccctcgggcgtgccccccgggatgccaggccagcctcctggagggcctcccaagccctggcctgaaggtgagctccctcttctatggtggtgcacccgtgcccttactccccatctcaagcttgggtccttgagatgagctttgtcagggagaaagggccgagggtggtcaggctgaactgcagcctgtacttttcttgtggtggtccccgggtctcccctgtagccagtcagttcccaaaggctgtcgttcatccctcctctgacagcttgtggccttcacccagtccctgagccctgtatatgtaattgctcagtaagtgctgcaggctcccatctgttgggctcaaagaggcagtgggactcattacccatcctcttggagcctgaggtttagcgatgggcattgaggggcaaattgcttccactggatttagttggcactaggaggagatgacaggaaatgctgccatagagccacagacagaacaaaaaggccttgggagcctggggctggccccagtggagggtgtgaaggacgagggtgaggctgagatctggaggaggttggagcccaaggcaggtgtgaaggacacccctgggtgaaaggtgggagatgggcggggtctgcctgtccccagtgcctcaagcagctcagcagctttccatttccagcccgggatgggccccagagctcaacatgacgccctggccccttgccttctcccaggacccatggcgaatgctgctgcccccacgagcacccctcagaagctgattcccccgcagccaacgggccgcccttcccccgcgccccctgccgtcccacccgccgcctcgcccgtgatgccaccgcagacccagtcccccgggcagccggcccagcccgcgcccatggtgccactgcaccagaagcagagccgcatcacccccatccagaagccgcggggcctcgaccctgtggagatcctgcaggagcgcgagtacaggtgagggcggggcccagttgccaaggtcactgccctgtgtcccccatgtccccctggggaagccactcaactttctcccccactctagcaaacagtgccctgtgcccaccactgccacttggcctacacctccttcctcacctccctgctcccaccctggctgcggtctgtttcccacacagcagtttgagttctctctctttttttttttttgagacggagtttcactcttgttgcccacgctggagtgcaatggcacaatctcggttcactgcaacctgcatctcctggcttcaagcgattcttctgcctcagcctcctgagtagctgggattataggcatgcgccaccacacctggctaattttgtatttattttagtagaggcagggtttctccatgttggtcaggctggtctcgagctcctgacctcagatgctcccaaagtgctgggattacaggcatgagccaccgcacctggcatgaattctctttttatgattgatatcagatctactccgtggattaaaacctgcctgtagcttcaattatctgcccaataagctttgccttatgtccactcctgcccagcatccttcctcacccatcccagtctctctgttcctcttttcatttatttaacaagttagacttgttcctgccccaggacctttgcacaggctgtgcatggctccttctactcattcaggcctgattgctggggttccctcctcatggaggcccttcctgtcacttccagccactctctggaattgcagtggatattttattttttttaaatctcctttatggcctgtgttttctaatgagactgagagttccttgctttgttgttcttgtttagtgctaaggccctgcacttaaaatggtccctggcatacagttggtgctcaatgagtatgtgcagaaagactgattaagagaattagcccacataaccttcgcatgtaaccttcgtaaccttcagaccaagcctctagggtcactccgaggggttgcctcagttttgaggtgagaatgctgaggtgtgcagttgaaatagattcccaccgccctgcgcctcatccatgccagagctgcatgaaaaccttggcccgcctgacgccagaacctggctcacaccactgaaaaggcatgacctgggcgcgtctatcaggaatcttgtttgctgtcccctgaggcccggtcctgaggagtgccccgggctatctccctctctgctgtgccctgcggccagcatcctcttctgaggcatctcttgcctcatgactagtgcctgcctctctcgagggatgggtcccctgcagctccagctgtaactgggtgccctggcaaccctctcaccgcctttgctccttgtctctgctcccaggctgcaggctcgcatcgcacaccgaattcaggaacttgaaaaccttcccgggtccctggccggggatttgcgaaccaaagcgaccattgagctcaaggccctcaggctgctgaacttccagaggcaggtgggtgctggcatggccgcagctttccgaaaagggcctttgtcaccaacactgctgctaaggctccaaatacggcttgcctggctagtattacacctgcctgggctgtgaaaagcagccgtggccatccatgggcactcaatcactgcagagccttcctcttacggcctgcgcagtgctggggacgtggacctcactaccctaaagcacttgccgcctcaaagcagacttgtatgggcttctttcttcctttccctttccctttttttttttttttggaaacagtcttgctctatcacctaggctggagtgcagtggcataaactctgctcactgcaaccaacgcctcctgggatcaagcaattcttctgcttcagcctcccaagtagctgggattacaagcgtgtgccaccatgcctaatttttatatttttagtagagacagggtttcaccatattggccaggctggtctcaaactcttgacctcaaatgatcggcctgccttggcctcccaaagtgctgggattacaggcatgagccaccacgtgctgtcctgcatgggtctatttctgagggtactgtgcttagaccctggagtgcagtggagagatcacagctcactgcaaacttgacctcccaggctcatgtcctcctcccgcttcagcctcctgagtagctgggactataggcgtgcaccattacacctggctatatttttcttttttttgaaacagagtctcactctgtcacccaggctggagtgcagtggtgccatctcaccccactgtggcctctgcctctgtggttcaagtgattttcctgtctcagccactgagtagctgggattacaggtgtgcaccaccatgccgggctgatttttttgaagtgcagtggcacaatcttggctcactgcaacctctgccttccaggttcaagtgattctcccacctcagcctcctgagtagctgggattacaggcatgtgccccacgcctggctaatttttgtatttttagtagagacagtgtttcaccatgttggccaggctggtcttaaactcctgacctcaggtgatcctcctgcctcagcctcccaaagtgctgggattacaggcatgagccaccacgcaggcctggtttttgtatttttaatagacacagggtttcgccatgtcgcccaggctagtctcgaactcctgagctcaagccatccacctgtctcagcctcccaaagtgctgggattacaggcatgagccactgctcctggccgcctagttaatttttcttctagtttttgtagaagtgaggtctctccatgttgcccaggttggtctcaaactcctgggcttgagcaatcctcccaccttggcctcccaaagtgttgggattactggcgttaagccaccacacccagccaagagtgttatacttctgaatgactcctaagacgtgtgtgtggtagaggggaggcaagctggaggtccgagaggaccccctggatagatgtccagaagtgatcaccttctgtcctgtgctcgccctgcccgggggcacctgctagacgtcccctgcacacacggactgggtgtgtaaggcacttacaatgctcctttagcggtgaagcatgtgacatcaccatacgtgtttgtcattgtggatgccacagagctgtgcagtgcgcgggcttgtcctcttccctcctacagctgcgccaggaggtggtggtgtgcatgcggagggacacagcgctggagacagccctcaatgctaaggcctacaagcgcagcaagcgccagtccctgcgcgaggcccgcatcactgagaagctggagaagcagcagaagatcgagcaggagcgcaagcgccggcagaarcaccaggtacgcyccggtggccccaaggccctgcagcccgcccacctggctgcctggcttgtccagcggttgccacggggctgtgtttgctttgttcctaaacatgctgcttgtctctctcttttgctcattgtaacagtattctaggtactgagagtgtattggtgtaaaaacccaatggtagggagaagatagtgatgaaatccacgcgtagcacgtctggaaggtgatagggcacaaagaaaaatcaagccaggatagagaggaaggaacgggctgttgtagaactgatgttgggggagttctttcttttggaggtgacatctgggcagacccccaaggaagggaggcacacagatctgtgggaaagagctttctgggaaaaggagaaggtgcaagggccctggggctggaatgtgcctgtgttttctctggaaagcaaggacctgcatgagccagagtagagtgagtggcggggagagctggaggaagggagcgcagggaggtgacgagcaggtgatgcagggccttgcgagctgcatggaggatttgggcttttgctctgagtaaagtgggagccatagagggttctgggcagtgcagggactgatctgactcagggtttcccaagatgaatcagtaagacggaaatcttcaaatctaaaatcaagtaaggatttggggatgattgtgctgatttggtcatttatagattttctagagattttctataattaatatcttattggtgtagtgtaaaataatctagacagtcaacacagcaatctctgttaacttttttttttttttttgagatggagtctcgctgtgtcactgaggctggagtgcagtggtgcaatctcggctcactgcaacctccatctcctgggttcaagcagttttcctgcctcagcctacctagtagctgggattacaggcacctgccaccatgcctggctaactttttttttgtatttttagtagagatggggtttcaccatgttggtcaggctggtttcaaattcctgacctcaagtgatctgtccgtcttggcctctcaaagtgctaagatggcaggcgtaatcccccgtgcctggccaacatttttttttttttttttttttgagatggagtttcactcttgtcacccggactggagtgcaatggcacgatcttggctcactgcaacctctgcctcctgggttcaagggattctcctgcctcagcctcccaagtagttgggattacagatgtgcgccgccacacctgtttgtttttttctttttttgagacagagtttcactcttgttgcccaggccggagtgcagtggtgcgatcttggttcgacacaacctctgcctcctgggttcaagcgattttcctgcctcagcctcccaagtagctgggactacaggcacctgccaccatgcctggctaattttttatatttttagtagagatgaggtttcactatgttggccaggctgctggtctcagactgttgacctcgtgatccgcctgcctcggcttcccaaagtgctgggattacagacgtgagccactgctcctgaccaccaacatttttttatatatattatttcagccttttttcttgtatattaatacaaggttaaatagccctttttaaattttttctaaaactttgctttttttttttttttttttgagtcagaatctcactctgttgcccaggctggagtgcagtggcacgatctccactcactgcagcctctgtcttctgggttcaagcgattctcctgccttagccacctgagcagctggaattacaggtgtgcaccaccacacctggctactttttgtacttttagtagagatggggattcaccctgttggccaggctggtcttgaactcctgacctcaagtgatccgcctgccttggccttccaaagtgctggaattacaggcgtgagccgctgctcctggccacatcgctttgtttttaagtatcatggaaacatgacttttgatgtctacactgtattccatttctatgtgtccaggatctaatcatttatgtcacctttttcctgtttgaggacatgcagcatgtttcagcttttgaaaattaaaaattatgctaggaccggaattcttggcttgaacattttggagctggtctctgatatttccttaaaataaatttgtagtaatggaataagttgggtgaagggttggaagcatttttgagacatttcacatccgtgccatgctgccctgccagtcgactgcactgtgtgcctacctgctgtgtttgagggcctttcccacccacagttgccggtgcttagtttgtttttttttttgagacggagtctcgctctgtcgcccacgctggagtgcagtggcgcgatctcggctcactgcaagctctgcctgctgggttcatgccattcttctgcctcggcctcctgagtagctgggactacaggtgccagccaccacgcccggctaattttttgtatttttagtagagacggggtttcaccatgttagccaggatggtatcgatctgaccttgtgatctgcccacttcggcctcccaaagtgctgggattacaggcgtgagccaccgcgccctgccgccagtgctgagttttatcatcagagagagaaacccaaccgcggcaggcaaagggtgtccctttattgttttcataatagtctcgtttttattttatgtattatatttatttttttgagatggagtctcrctctgtcacccaggctggagtacagtggtgcgatctcagctcactgcaacctctgtctcctggattcaagcgattcccctgctttggcctcctgagtagctgggattacaggcatgtgccaccacacctggctaatattttttrtatttgtagtagagatggggtttcactatgttggctgggctggtctcgaactcctgacctcaggcattttgtcctcctcagcctcccaaagcgatattctaggtttttttttttttttttttttttgagacagcgtctcactctgttgcccaggctggagcacagtggcacgatctcggctcactgcaagctccgcctcccgggttcacgccattctcctgcctcagcctcccgagtagctgggactacaggcggcccctcaccacgcccggctgattttttgaattttttttgttagtagagatggggttttaccatggtctcgatctcctgacctcatgatccgcccgcctcagcctcccaaagtgctgggattacaggcatgagccactgtgcccagccctaatttttttatttttatttttagtagagacggggtttcaccgtgttagccaggatgatctcgatctcctgacctcgtgatctgccctcctctgcctcccaaagcgctgggattacaggccaatattctaggttttaaacaagccttgcggggagatgtgtccaccatgctgctgaagggtcagccttctcttttgtgctttcctgcaggaatacctcaatagcattctccagcatgccaaggatttcaaggaatatcacagatccgtcacaggcaaaatccagaagctgaccaaggcrgtggccacgtaccaygccaacacggagcgggagcagaagaaagagaaygagcggatcgagaaggagcgcatgcggaggctcatggtatggtcctgccttcttgacgtgcgctcttctacatgtgtagctggtactgcgggctccaggggtcactccccagggttacgccaaggcatttcacagctcggagttagaggtgggacagagggaaaagagcaggcgcgggcttgggagtcagtcctgggctcggatatttgctgatctctctgatsatcagaatgactgtgtgacctcaggccacttagccggctcctctgccttctctggaaaatggaggtggtgcccccttccctcgttctgtgagagccaggtggtgtgatccagacccccgacccctagcataaacatctctgaccatttatttgtgactgagtcgctggttgggcagatattggcagcgtgttctgggccaggtgctgctctgtgtacggggacatggcccctgcctttgtgggggctcctggttgtgcttgaggggcagatacgcgaatgaagcaaacagagtagtggatggtgaccgctacagtgaggagggggaagtggagtggaaggggagggacagggtagtaagtaaaagccttgaaacagaggcccaaagggtggccctgatgcacaaacgcagagacccagggaaggagccccaggcagtgcggacaaaggttgaggtggcaggcagccatgtgccagggcagccggtagccctgggctcccagaacagcgttgtgtggggcaggaggtgaggtcagagcttacaggggcaggtgggaggtgggacctttcagaccattgggaggactctgggttgagttctgatcatgaaggggagcctcacccgggagggttttggctgtggggtgatgtgatctgatgtattcttagaaaggtggggggctgctgtaggaggtggtgggagggatgcaccttggacttggtggagagaaggcttygggtttggggtgtatttcgtggacagagtgggtaggactggctcatggcctctgtaaatggctgctggcgggactgtctgcctagcgggtgcccttggaacctagcccttggtgggttttgaggaaatgattcctgaatgaggagtcgattgccgtgtgaagggctggtggcacggcacccgcgtgagctacgcgtgccctcagtgcgcttctggattgactggccatgggtgctcacagacatgcacattgtgccaccacattgcagtaacccccatgcttttgtaggctgaagatgaggaggggtaccgcaagctcatcgaccagaagaaggacaagcgcctggcctacctcttgcagcagacagacgagtacgwggctaacctcacggagctggtgcsgcagcacaaggctgcccaggtcgccaaggagaaaaagaagaaaaagaaaaagaaggtgtgctgggcctggcatggtgcccgccrcgggtgggatgggagcagccgtcttcacgtgtgtggcctcagccttgyrggtcagggcctgaccgtgtctctctctatttccagaaggcagaaaatgcagaaggacagacgcctgccattgggccggatggcgaggtgaggaagcagggtttcttgtggaagtatcaagctagccctaaggcgttggtctgtttcasactttaaaacctrtgttcttttaaaattacgaacaatgatatgtgatgatggtgagaatcccagggtgtcctctgacgcccatcccacccgaccccacatcccacatgttgtgttttcttccagacctttttctatgcatgtgccacaggattcatctttcaggttttactttgttgtaacgtccgacttacaggagaggtgcaagaaccgtccagagatgtcctgtgtgttcttcacccagagtctccattttcacgttttgtgttttgttttgtttctttgagacagggtctctctgtcacccaggctggattgcagtggcggatggctcactgcagccttgacctcctgggctcaagtgatcctacccttcgagtagctgggattacggttatgccccaccacacccagctaagttgtttttttttttgagatggagttttgctcttttgcccaggctagagtaaagtggtgcaatcttggctcattgcagcctccgccccgcgagttcaatcaattgtcctgcctcagcctcctgagtagctgggattataggcatccaccaccacgcccatttaattttatttttatttatttatttatttattttagacggagtctcgttctgtcacacaggctggagtgcaatggcacaatctctgctcactgcaagctccgcctcctgggttcacgccattctcctgcctcagcctcccgagtagctgggactacaggcacctgctaccacgcccggctaattttttgtgtttttagtagagatgggatttcaccgtgttagccaggatggtttcaatctcctgacctcgtgaacatcggcctcccaaaatgctgggattacaggcttgatccaccatggccagccagtttttgtatttttagtagagacggggtttcaccatgttggccaggctggtcttgaactcctgatctcaagtgatccacccgccttggcctcccaaagtgccaggattacaggcataagccaccacgcctggcctaattttttaaaatttattttctatagagacgggggttccatatgtttttcaggctagtctccaattcctgggctcaggcatcctcctgcctcagcctcccaaagtgttaggattataggcatgagcccccgcacctggccttcacctgtgttttttcctaaactctttgagagtcaaatgcagacgtgacagcgccttacctccatgtaattcattatctacttcataaagacaaggttgtttctgcacactgtaccgaggtgacggacacaggaggtgaacattggtacagcactgttatccaatctataggccttcgtatgaggtttggccagtttttccagttatcttcacagcagcagagaatcctgggtcacatttagtggaggtccctttagtcagctttagtcttaaagagctccttgtgtgtgtgtttgtttttttgcagagatggggtctcatgttgcccaggctggtcttgaactcctgggctcaagtgatcctcccacctcggccttccaaaggctgtgattataggcgtgagccaccacgcttggcttcaggccagctatgtcatccagtggccccggactttggtttgtctgatgttccttgtggttggagttgggttatgtgtctctggcaggcagacccaacatggccctgagtccctctcagggtgtcatatcgagagtgcatggcggaggttagcaaataaggtcactggtgatgctgactttgaacccctgccaagggatctccactgtccagttactgtttttttcttttgtaatcagtaagtaccctgtagggagatacttgagactctgtaactatgttgtaactcctcagaattccagctactccttttagtatctttttttttttttttgcctgtatcagtttttgctctgatggctacaggatggtgacttttatttccatcgttctttctgcattgatttgtttgtttttctatagtaggaaaagctttctctttggtcctgttagtcctgtggccatggtctgccaacccctggtgtagacttacggattcttgtttagttgaatgaatggattccgatcctttaaaatgatttcttttggtcatttagctttagccagcaggagccccttgccattggctcctgtttgcttttggtacatgcccaccattcctggagcacttccttcctcatcagacttttcttctgctttccctgcctgagctctctggagccaactctttctccagggagtcctggttccttttttttttttttttgtctgtcaagacggggtctccctgtgtcacccaggccggagtgtgtggtggtgcaatcatggctccctgtagtctcaacctcctggactgaagcgatcctcccacctcagcctcctgagtacctggggctacaggcgcacgccaccatgcttggttaagtgttctgtatttttttgtagagacagggtttcaccatgttgcccaggctggtctcgaactcctgagctcaagcaatctacctgccttggcctcccaaagtgctaggattacagacatgagccactatgcctggctatatttcgtattattacagaagaatatttacatgccaagatctgactttgggggtgcttcctgctagtgggccatcactgcttctaggccctctgagcagccggatctgggaaatagatgtatgtacacatactcatctgcattgctgtttgtatatattaaaacttgtggctgggcatggtggctcatgcctgtattcccagtactttgggaggccaatatgggaggactacttgagcccaggagttcgagaccagtgtgggcaatatggcaaaaccttgtctttataaaaaattttaaaaattagttgggtgtagtggcatgcacctgtggtcccagctacttgagaggctgaggtgggaggatcacttgagtccaagagtttgaggctatagtgagctgtaatctcaccattgcactccagcctggtcaagacagtgagaccctatctcacacgcaaaaagaatcttgaggttatactgacacctccaattctaatccaacagcacagggttaatttttatcctttccgcctttccataattctaaaatcagcaacctgatttcccttagcaataataggcttacttacctgctccattttagaatacacagaaagtacgttccaaagtgctaatggacacctctatgcagaagtctcctagttagagttcagtatttatagagttcctctacctcaggatatgtgttccaaatactgtgtccagaagttactggggccgggtgcggtggctcatgcctgtaatcccagcactttgggaggccaaggtgggcggatcacctaaggtcaagagttcaagaccagcctgaccaacatagtgaaacctcgtctctgctaaaaatacaaaaaattagccaggtgtgggggcacacgcctgtggtcccagctacttgggaggctgaggcaggagaattggttgaacctgagaggtggaggttgcagtgagccaggttcatggccattgcactccagcctgggtgacagagtgagattctgtctcaaaaaaaaaaaaaaagaagttactttggaccaggtgtggtggctcatgcctataaccccagcagtttgggttgctaaggtgggtggatcgcttgagcccaggagttcgaaaccagcctgagcaacatggtgaaacctcatctctacaaaaaattaaccaggcttggtgcgcacgcctgtagtcccacctactcgagaggctgaggtagggggataacttagcccaggaggtccaggctgcagtgcactgtgtttgtaccactgcattccagcctggggagctttttattacttgagacagggtctctctctgtcagccagttctgtctcacagttctgaagccatctggaggactcaagaaaaaagtaatgggccaggtgcggtggctcacatctgtaatcccagcactttgggaggccgaggcaggcagatcatgaggtcaggagttcgagaccagtctggccagtatggtgaaacccagtctctactaaaaatacaaacattagccaggygtggtggcaggcttctgtagtcccagctactgggaggctgaggcaggagaatcacttaaacccgggaggcggatcacaccactgcactccagcctgggcgacagagtgagactctgtctcaaaaaaaaaaaaaaaaagtcatgaagtgggaaagtgcatgaagtgggagcttgtgctcagtcctgctgtggctgcctgtcctgtggagtgttgagaacaggcaccggcacttgctgctgcttgtgggttttcttgttctcggacagtggtactcagcctctgttgtgtgttctagtcacctggggagctctctattattattactactattatttgagacagggtctctctgttgtccaggctggagtccagtgatgaggtcatggctcaccgcagccttgacgtcctgggctcaagtgatcctccgaggacctttttctaagtagtagctgagcatgaaggcatgtgcctgttgttgcagctgctcaggaggctgaggtgggaggattgctttagtccaggagttcaagaccaacctgggcaacatagggagactctgtctctccaaaaaataaaataattacctgggcatggtggtgtgcacttgcggtcccagctgattgggagccagaggtaggcggatcacttgagcccagggctttgaggctgtgatcacacctgtgaataaccatggtactgagcccgtctccaaaaaataaaaagtaaattaaaaatcttaaaaagcgaggatgcccaagcctcactccagaggagttcaatcagaattttgggtgtaggggaggcatgcagcaatcggcatctttgactgctcctcccagtgatcccagagaggatgtggagttgaaagtccctgactgaggcagcctgcagagcccattgttggggtaagaggttgctcttatggtggccgctctgtgggtgagcttttagcgcgtagagactgatatccctccgctgtgtggacggtattgacactgtgagcgcagcagttttgcaggtagttataaattcctggaagatgaaaaccaaaatttaaaccaataactttttctccatcctggaagttttttctaggaaatatacaagaattgatgagggagaaaatgtttatccattgaatctcaacaggaggagtttcatatttgttgctaagaggaattatttttgaaatatttcaattagctttttaacaaaaaagaatgaggacccttgatgagatctacaaatagagtataagtgggggaaaaaatcaaggtccaaagaatgtaaattatataaccgttagtgtaaaaaagagggagaaagtggaaacgtctaagtccttgtttcttatccatggaattgatctggaaggatggacaggaaactgataccagtggaaaactgtgaagagaaaaacttaggctggagcacagaagaatggggagagcccacatgatgctcttcagttttcgttaaaaaaataaaaatgggccttgggaggccgaggcgggcagatcacgaggtcaggagatcgagactgtcttggctaacacagtgaaaccccgtctccactaaaaatactaaaaattagctgggcatggtgatgggcacctgtagtcccagctactctggaggctgaggcaggagaatggcatgaacctgggaggtggagcttgcagtgagccgataccgcaccactgcactccagcctgggcaacagagtgagactccatctcaaaaaaataaataaataaaaataaaaaataaaaatgggccgagcatagtggctcacgcctggaatcccagcactttgggaggccaaggcgggtggatcacatgaggccagaagtttgagaccagcccggcctgaattttcagctatgagtgtctggactatttgaaaattacaatgtatatgccagttaccttaaagaaacaggtgttgggagactgaggcagagaattgcttgaacccaggaggcagaggttgtagtgagccgagagccgagatcacgccactgcactctagcctgggtgacagagcgagactccgtctcaaaaaaaaaaaaaaaaaaaaaagaagaaacaagtgtcagccaaggttgatgggttatatatttttactggattactgagtatacagtttacgcattttcccaccactggccatgtttgcctgccattttctgtgcaaacagttgagtgggtgcttcccaccttggcctctgtaagygtttggtctggaggccctgcaacctcagtgtcacacgaatgactctttttcagcctctggacgagaccagccagatgagcgacctcccggtgaaggtgatccacgtggagagtgggaagatcctcacaggcacagatgcccccaaagccgggcagctggaggcctggctcgagatgaacccggggtgagttgggccttgcattccagatgcagtggggatccaagtcctcggtgggccttgttccagggargtggcagccaggagcaattttacttctgtttgaattcccggcaggtttggtagggaaagtgaattctgctggctctgagcagatttgtatgaaakcccttacattttttctaggtatgaagtagctccgaggtctgatagtgaagaaagtggctcagaagaagaggaagaggtaagagtgcatttcctggctttcaaggctctcagtgcccactggcagtgacttccaccctgtgtgttgtgaccgtctcctgccctggctgggcatcttgtggggcagggaacagcagggcccaggcctgccygaagtcggtgctttagagctgtcctatccaatagggcagcttctggcgacatgtgaccatttccattttaaattaaatcagtcacattacataaaatttaagactcattttctctttcacactggctgcatttcaggtgcttggcrtcccttatctgggaatggtctgcctcatttgcccattttttttttttttttttgaaacggagtctcactctgtcacccaggctggagtgcactggtgcaatctcagctcattgcaacctccacctcccgggttcaagcaattctcctgcctcagcctcccaagtagctgggactacaggcgcctgccaccacgtccagctagtttttttatgtttagtagagatggagtttcatcatattggccaggctggtctcaaactcccgacctgaagtgatccacctgcctcagcctcccaaagtgctgggattacagacatgaacctccacgtccgacttatgatttttttgttgttgttttgaaatggagacttgctgtgttgcccaggctggagtgcagtggcgcgatgttggctcactgcagcctccacctcccgtgttcaagcgattctcctgcctcagcctccctagtagctgggacttcaggcacctgccaccatgcctggctaatttttgtatttttagtagagacagggttacaccatgttggccagtctggtcttgaactcttgactggtgattttttttttttttgagacagagtctcactctatagcccaggatggagtgcagtggcgcgatctcgctcactgcaacctccgcctcccgggttcaagtgattctcctgcctcagtctcctgagtagctgggattacaggcgcccgccaccatgccagctaatttttaaaatatttttagtagagatggggttccaccatgttggccaggctggtctcgaactgctgaccttaagcgatccacccacctgggcctcccaaagtattgggattacaggcacgaaccagtgcgtcaaagtctgttctgtgttagtcactctaaccctcttatgattattgttcacatggtacatctttttcccttcttttactttcaacctgaatctacaacagcatatgggttttgcattttcagctagtatgacagtgactgctttttgactgagtttttaagaccatttatatttactgtaatttctgatatgattgggcttacatttgctatttcttttctatgcctcctgtttttgttcctcctttactgccttttgtgttcaatgttttttttccctagatttttatttttatagtgccttttttttttttgagacggagtctcgctctgtcacccaggctggagtgcagtggagcaatctcggctcactgcaatctctgcctcccggrttcaagtgattctcctgcctcagcctcccgggactacaggtgcatgccaccaaacccggctaatttttttttgtatttttagtagagacagggtttcaccatgttggtcaggctggtctcgaactcctgacctcaggtgatctgcctgccttggcctcccaaagtgttgggattacaggcgtgagccaccacgcctggcctctcctatttttttgcttacctcttcatgtttagttgaagcgtactttagctaccctggagtctgacttttaaaactctgggaggttgtggtggcgtctagtctgtttagtaatttcctggggctcagtctgtgaaatctggttcctgcatagtgtgtatagcctctgctgtatttcctcaattcttttaaacattttttggttttatcttattcgtgatttttttcctggttcattaggggcaggcagtgtttctttgtcacttagtggtcatccaaagattggccacagtttgtgctcagacacgcgccttctttctcctgctgatggttcagttgtatgaggaggtgcattccacatttgggccattgtcgggttctccctggcacttatgctttgctgagtcctttggcgtctctttgcatatgcacagactcagcctcagccagtgatacgcttttccctaccgtggctgatctcacctccattagcagtgccactggctgtgggcattgcttccttctacaagtgactgagccccttccacctccctgccaagcctcatggcctgcagctctccagctgtaagaggttcatgtgtccagagctgaggcagaagaagtgaaagtggcccacagtaaaagtgctacaaactcccactcttcccacctgaagttcagttttttaaggttcaatgattctagtagacctttggtcaactcgctgagctctgaaatgctcactctgtcaatttgtccggctttatagttgcttttggggaggaaatttgcccacctcctcatttgggtttagccagaagtctcactcctattttaattccagcatgtctgtaccagctctgattttcttgcctaaaatgtcggtgttattaccacctgtttattccaagtgatctgtaaaatcattttttgtgacctaagggaaatcctactggcttttcactggaattatttaacagattaattgcagatcatatttttaaagctttgtagcagttccattatagatgagggaacaatcaactgtgttgtatttgtaggatttaaatggcaatacaagaatagtttaagataaggaaatgcattcttgtctatgttatcaatatgtgttatgcaaaatcgcagtaaaggctggaaagccattaaatgatgcaacatgaatgattaaacaagttcgtagataacttgcagtaaactgagatgcctcttgtcgccagtgttatcagacatattgtagatggttgagacttgtcagtaaagctggaagtaaattacaagcaataaatattgaaagttggttctaagatatttaaagccaggcgcggtgtctcacgcctgtaatcccagcattttgggagggcaagttgggtggatgatccaaggtcaggagttcgagaccagcctggccaacatgatgaaaccccgtctctactaaaaaatacaaaaattagccggggtgatggtgggctctaagatatttaatacctaggaaatccaagagaatcaactgataaactgctttagtaggtcagcagagaatagacgtgtaatgttcattgtataacaggggtaggagagatatggagtctacttctaattagtaatgaaagtccacaataccctgagatagccttaaaagaagcgtcggggccgggtgcagtggctcatacctgtaatcccagcactttgggaggctgaggcaggcagattcttgagctcaggagtttgagaccagcctgggcaacatagtgagtccctgtctctaccaaaaatgcaaaacaattagccaagtgtcatagtgcacgcctgtggtcccagctactcgagaggctgaggtgggaggatcgcttaagtccagtgggtggaggtagcagcgagctgagatagcaccactgccctccagccagagtgacagagcaagaccccatctcaacaataacaaaaaaaaggaagtgtcaggaatctgtggtggggaaaccaaaaacggtttactgggctgggtgcggtggctcacgcctgtaatcccagcactttgggaagccaaggcaggcggatcacgaggtcaggagttcaagaccagcctggccaacatagtgaaaccccgtctctactaaaaatacaaaaattagccaggcatggtggcgcatgcctgtaatcccagctacttgggaggttgaggcaggagaatcgcttgaacctgggagctggaggttgcactgcgccgagatcacgccactgcactccagcttgggcaacagagtgacacttcgtctcaaaaaaaaaaaaaaaaaaaaaaagatgtagccagtgtggtggcatttgcctgtagtcccagctacttgagaggctgaggcgagaggattgcttgagcccaggagtttgagaccagcccggggaatgtcacgagactacatatctacaaaaattcaaaacatttgagctgggtgtggtggtgcatagctgtagttctagctgctggggaggctgaggcaggatgattgcttgagctgaggagttcaaagccatctgggcaacatcctgagactcccatatattaaaaaaaataataataaatacataattttaaaacaaagatgtaaataataaacagcacacattccaggataggtagagggggtgagggctgtaagaagatcacttgcttctgagactgttctccccatgggagtcccgtcccccctctctgggggatgaactgaggtgacaygggcttgtctcttggtaggaggaggaggaagagcagccgcaggcagcacagcctcccaccctgcccgtggaggagaagaagaagattccagatccagacagcgatgacgtctctgaggtggacgcgcggcacatcattgagtaaggggtccygacacaggttgttctgtgccagcttcctgtgaggtggcgctggtgggagtggctagaatcccagccatccctagctgacattcagcactgtccagccagctgctactgtggaactacagagaccaaatttatttacttcacatttcatgtattttatagggatttaatagagcaattgcattcgcatggttcaccatatgcttacgaggtacagtcaggtgtgcgggagaagccctcctcaccccgttctctgctccccggctccctccctttccactaccctccctggggaaactttccagccttgtgtgtcatcttccagagatgctgtctgcattagcaagcaaaatgtgcatatttttgtcttcatttgcatacatatctccagtgtacattggtgtgcaccttgttattttcactgaaccttccctcttggaggtcatcctgtgtccgtgcagagtgcttccagtctggtcctcagcgtgcagtgtcatactgcgtcacgttatattctcattttcgtagcctgtcctttggtgacaagcgtttaggttatatttstcatcttttgctcctgtaacacatcacagttaacacagtaatctcttcattgcttatggtaaggaattaatagatcctgttaaaaagcaagtgagggctgggcgtggtggctcaggcctgtaatcccagcactttgggaggccaaggcaggtggatcacttgaggtcaggagttcaagaccagcctggccaacttggtgaaaccgcatctctactaaaaatacaaaaattagctgggcgtggtggcgtgcacctggagtcccagctacttgggaggctgagacaggagaatcgcttgaaatggggaggaggaggctgcagtgagctgagatagcgccactgcactctagcctgggcaacagagggagactccatctcaaaaaaaaaaaaaatgtaggtggataaaagtcacttttttttttttttttttttttttttttttttttgagatagagtcttgctcttcaccaggctggagtacagtggtgcgatcttggctcactgcaacctccacctcctgggttcgagtgattctcttgcctcggcctcctgagtagctggcacaacaggcgcgggccaccacgtccagctaatttttgtgtttttagtagagatggggtttcaccatgttggccaggatggtcttgatctcttgacctcatgatctacccactttgagctcccaaagtgctgggattacaggcgtgagccaccgcacctggccagagttactttttaaaagaaaaacattcagattagattacaaattgcctaagttttaacagctctggttttgtatgaacctgttcagtctgtgtttcttttcacctttaggctcatgaattgttcttagaaagggtgggttctatgatgatcagcatctggctaggtgcagagtgtctttctgtgctgtggcaagtgacagcattctatttgttgttttgagacagtcttgctcagtcgcccaggctggagtgcagtggctcgatctcttgactcactgcagcctctgcctccgggcttaagtgtttcttttacctcagcctcctgagtagctggggttacaggcatgcaccaccacgcccggctaactttttttttttttttttttgagacagagtcttgctctgtcgcccaggctagagtgcagtggcacgatctcggctctctgcaagctccgcctcccaggttcatgccattctcctgcctcagcctcccaagtagctgggactacaggcgcctgccaccacgcccggctaatttttgtatttttagtagagacggggtttcaccatgttggccaggctggtctagaattcctgacctcaggtgatccacatgccttggcctcccaaagtgctgggattacaggtgtaagccactgtgcccagcctaatttttgttttttgtagtagagatggggtttcaccatgttggccaggctggtcttgatctcctggcctcaagtgatccacctgcttcagcctcccaaagtgttgaaattacaggcgtgagccaccacgcccatcagagtgacagaattcttgtactgtggtggtgcaatcaggacccagagctcccaggagtccagtctggacccctcaggcttagtgcgggctgccctgcctggcctcacactgtccggctgcacctctatgtgtcttacagtgctggccacaggtcattcagcagaaagggccactccgcagagcttgtgtcaggagccagcacattgtcacagataggaatgtgtgtccttacccggcacctccatctcactcccaggaatgccaagcaagatgtcgatgatgaatatggcgtgtcccaggcccttgcacgtggcctgcagtcctactatgccgtggcccatgctgtcactgagagagtggacaagcagtcagcgcttatggtcaatggtgtcctcaaacagtaccaggtgaggtagggggtggggaggccaccgccacgtagctgcctcggtgcaggtgttcccaggtggtgcgggcttcagacctcaggcagacctgagttcaccttttgctctttgtgggcaatgcactcttcccctctgagcctcggtttccccatgtgtaaagcagagatgtggtctggtaggttagctgccaggaggacgtgcaacagcagaaagtcagtgtctactgggtgcccgatgtgccaggcagagtgggagcgatttgcactccagtggcctcacagaggagacggggccacctgaggagcagagaggtgcagcacctcctcagcatcgcaccgtgtgtaggactgaaccagggccggagctcagatctgggcatctgcatgctcaggacaggttacctgagctctgtgtggtgtgaaacggcgagcgtcaggagcttagatctaggagccggcagccctggactccgctctttcttctggggatgaggtagcaggtcctgtgtgagggtgaaaagttggtggctctgaagctcttcacctgggcctgacttgggacagtcacgaaacagagctgctcatgctcttaatgcggcctgccatccagagctcattacaaggccccacaagacaaccagtacaactccaaccaaagaacagctctctctggttttcaatttggttgtttcttttcttttcttttttttttttgaaacggagcctctctgttgcccaggctggagtgcaatggcgcgatctcagctcactgcaacctctgcctcccgggttcaagtgattctcctgcctcagactcctgagtagctgggactacaagtgcgtgccatcacgcccggctagtttttgtatttttagtagagacagagtttcaccatgtcggccaagctggtctcaaactcctgacctcaggtgatccgcccaccttggcytcccaaagtgctgggattacagatgtaagccagtgcacccagccccaactttctttaagacaactcttaaaccttttgtgctagtatcaacattcaaagctgcacatgcacctatagtcccagctacttaagaggctgagatgggaggatcgcatgagcccaggagttgaaagtgggcctgggcaacatagtgagacactgcctctacaaaaatattttaaaaattagctgggggtggtagcacacatctgtagtcccagatagttgggcggcttaggtgggaggagagcccgagcccaggacttctgagctgtagcgccctatgtcgatcaggtgtctgtactaagttcagcatgaatatgatgaccttccaggagtggggcaccaccaggtggcctaaggaggagcgaatctgcccaggtcagaaatggagcaggtcaaaactgatgtgctgatccgtagtgagatagtccctgtgaagagccactgcactccagcctgggtggcatagcgagaccccatctctataaaacaataatgaaacaaaggcaaagctcatggttagtggaattttccaagagtcccatgcaattaaaataattagaacttggctaggcgcagtggctcatggctgtgatgccagcactttgggagaccaaggcgggtggatcacctgaggtcaggagtttgagaccaggctggccaacatgatgagaccctgtctctaccgaaaatacaaaaaattagctgggcatggtggtgcatgcctgtaatcccagctacttgggaggctgaggcagaattgcttgaacctgggaggcagaggttgcagtgagccaagatcgggccactgcactccagcttgggtgagagtgagactcggtctcaaaaaaaaaaaaatgaattagaacttggccagaacttacttcctcaatccattacgaacatttccaaattttccttcataacgttatcttcagtttgcaaatagtcttctgtttaaggcctgtatttcagaaagctcccaggctttggaaatccctctcttaatcttgaaatgatgttcaggcagtgaattcctcacgaagtcgccctgaagccctcttggtttcctgagtgcaagtgtcccgtggtgtgggcaggtttttcctgtgtgctgtgtggggcatggacaggcagacaatgtaacaggtgggagtgagctgttgagatgtgtattagaaatgtcacacgtgtccatcgttcgcacagtcatcctgcagcttcacagacgttattgctaaggatgaggctaagcgataaagaatcagtttggttcagaggaaaaatccgtggtaaaggcagtagagggtgggatgtggcttaggcagaactcgtggctggcggtgtcttgactctctgaagtgggaggaccctctggtgtccgacccggccttcagtcctggcgtggccgcatctgtccttgcagatcaaaggtttggagtggctggtgtccctgtacaacaacaacctgaacggcatcctggccgacgagatgggcctggggaagaccatccagaccatcgcgctcatcacgtacctcatggagcacaaacgcatcaatgggcccttcctcatcatcgtgcctctctcgtgagtacccgctgccagcaacatcccacacgccgctcacacgctcctgtgtttgtttcctaagtttgcygcagtagaataccacaaacgaggtggcttaattacagaaatttgttttcctggaggccagaagtccagggtcaaggtgtagcaggttgcttcctcctgaggcctctcttcctgcttgcagggatacgtgcttacatgtatctcactgtgtcttcacatggtccttcctctgtgcgtgtctgtgtcctcatctcttcttcttagaaggacatgggtcaggttggatgagggtgcatcctaatggcctgctttaacttcattgcctctgtattggccctgtctccaggtacagtcgcatcctgagctgctgggggtcaggactgctccaccagcctcggggctgtgcacagctccacccgtcacagcctctgcctctgggtcccggatcaagtgggggcatgactgtgcatcccctccacccctggggaggcctggggtccctctcccgggatgtccttggtgtccttttcaagtcccacaaccagcaaagtccatgcaggggagtcgcaggagacaagaacctcccactagaaaagtagggtgaggccattgaggctccattgaacagtctctacttcctcactgtgcagtgccctgcaagggccaccagagccctcgggcacatcccagcatggcccaggtccttgggcatggtgggatccggacaccctgagaggctctcacttgccactgcctggctccaccggcctttttctccctgcaaacagagtccgcccccctgcccacctctctcgacatctctctacccagctcagcccctgcactaaagggggacctgcctagggttttcccagaaagccccagggccggctcttactggtccagttcaagtcacatgtccagcaagcagacagtcaccggcctgggggttagtctggtctgattgggcaaacttcagcatagcatttggtctggccctagagcacagcccctaactccaaccaggcactcattgggaccactacagccacgagtcagcagcggacccccaactcctggcaggctggggagcggcatgcccatgctccaaccccatgggaaaatgcccttctgcctataagacagccaggccccatgggtcacacacccatagggtaggcctgacgtcctgactgttgcagggaggactggaggaaaggtgaggaccccagaaccctcccaggtttactgtggaactgtttctttcttctatctccctgcttcctacgtggcgggtagaacagactgctctgaaggagcagggcgtccttgtgcacagcgctgcaggtagctgcacctcccctcgtggtcagacccagattgctacagcgttcctgctgcacctgcctgagctctgtcccctgtctgtgtctggaggctgttccttccggctctgcccacctcctggctcccctctgcccttcttcccctggaggctgatgggtgcagtggcagtcgccctctgcagttcccgattttccctcctttcacttacagacttctcagatcaccatctctgctggaacgccgctctccagggtgctgttgttttgcagccttggttcttagttgttaattttttgctttaaaaaatttttttaaacttttcattttgaaatgatctcatttatttttatttttttttattttttgaggagtctcgcactgttgaccagcctggagtgcagtggtgccatcttggttcactgcaacctctgcctcctgggttcaagcgattctcctgcctcagcctcccgagtagctgggattagaggcacgcgccaccatgtccggctaacttttttgcatttttagtagagacagggtttctccatgttggctaggctggtcttgaactcctgaccccatgatctgcccgccttggcctcccaaagtgctgggattacaggagtgagccactgtgcctggcgacctcattcttagaaaacattgtagagttagtgtaaagaattgctatgcacccttcacccatcttccccattctttcataaccccaagacaattatgaaaaccaggaagataacatggacgtaggactaatagcaaaccagaggccttatttaccaatcttgtcagttttctcacaagtggccttgctctggtccaggatcccacactgtcacgtctgtgtggcatgcctgtggcagttcctcatttcgtctttgtcctggtcgagcttgacgctgttgaatcctgatcggacctttggtagactctccttcaatttgggtttgtccgatgtgatcgcgtggagcaacaccacgccctgcttgatgtgccttagcggggaaggcatgagatgttgaggccttggtgtctcgggcaaggtgcctgctgggtttcccactgtaaacctaggagttacactttccgttaataactgtctcgtgggaacgtacttcgacacttgtgaatatctcatttctcttcctactttcctcaataatttcagcatctcttctactccatttcatgttgccataaaggaatacctgagactaggtgataaagaaaagaggtttagctgggcgcggtggctcactcctgtaatcccagcactttgggaggccgaggcaggcggatcacctgaggtcaggagtttgagaccagcctgaccaacatggtgaaaccctgtccctaccaaaaatacaaaaaaaaattagccaggcatggtggcgcatgcctgtaatcccagccactcaggaggctgagacaggagaatcacttgaacctgggagacgggggttgcagtgagccaatatcgygccattgcattccagcctgggcaacaagaatgaaacgccttctcaaaaaaaaaaagaggtttatttggctcatgattctgctggctggaagactgggcacctggtgagggcttcaggcggattccactcctggtggaaggcaaaggggagccagtgtgtagagatcccatggggagggaggaggcgagggaggcgggggtgccgggctccttttaaccatagctcccacgagagttcagagagcaggaactcattcatcccccatccccagtacagtacaggccgttcacgagggttcacgaggccgttcacgagggaggcccccatgacacagatgcctcccaccaggccccacctccaacattggaaatcagacttcagcatgaggtttggaggtgccagatacccaaactatagcagcaaacgtcagataagtcttgcctgaaaaaataattacatgagagttgccaaatacatggttacctgtttctgtccgctcttctctacaaattaattggaattccaccgttaggaagagctttcccgtctcccccatgtgcttgtttgggtaattattatatcagtgtgggcgtgaacaaatattatttattttgttgcttcagtttttttcagatttggcctgggagaattctccctggaagaattgtgtcttctctatgtattcagtcatttgttaatatgagtatggacccacggatatttatttagtactccaggctacgcaccagtggctgggttttttttgttttgtggctcaaatccatccagctttggccactgggagtgctttcagttggctcttctgtcctttgacacgcccccagcatcgggtgaattttgaggactttcttgctttttggcaccaagagatgctgcaggctcatgtagtctatttcccgcccactccctcaaatcagccatttctccaaggagccctggtttcccttcttacagaatggttttgggaaccaagacctgggtcctggatgggcctgttgcttctggggtgtcattgctcctggggccctctcagtggtcagtgctaggagattcatgtgcgcgtgctgatgctttgtgcacgtatcgtctaaaaggccttctctgcctcggcatctgtttctgtgttaagctgaacgtgagttcataccactgtctgcggctctgagtgaggaccacaggttccttctcacacttccaccctgtgtgtgcgcccattctcagcttccgtggacaacagtttcagagtagtgagccggtacctccgggaagcatcttgagccactagagcgcaggccttggggccagttccttgtgtgttcagacctccagattgcagtcagattccatttccagggtgatagaggtcaccttcttcccctacttcagtgaggttgtgaggtgggtgctcctgcagtctttcccactgcgccccacctgggcaagcgtccatgctgtggaacgccagctcctgcaggccagaagagggcccgcgcgctaggaaatgtttacggcgtatgggcatccggctgtgccggccctctcactgggaattgctgcctcctgccatgagctgcttgtcctgcctccgtttggacctctgtctctgggacctgtcccctcagtcccctcctgacccttgctcctggctcttctccctcccagtgcagatgctccgcacacctccggcttctcccttggtgcgctgactgtccccatcactccagggaggtttcactgttcctgagtcagcggaagcacagggtcaggccctacgggccaggtccggtggctccaagatgccatcagggacccagcctcccccaggtttctgcccagtcattcttgggtgactccaaccctcaggctccttacctcatggttgcaggacggctgcactgcctccctcgcctcatgcaggagagtgggcaggaragagttctaggagagtgggcagggcaaaaggcagcagaagcgcaaggctgctgagcctctgctccccacgcttcttcaggaactctccccagccttcaccacagccatgcgtccttctgtctattggctgtgccgcctggttggctgtggcttccagcggggctggagatgggttcatggtggacacagcacctccctcgtggagctgcttgggggcaaaccacgagtagtccctgggactccagcttcgagccctgtctttacggaccaccccgtctagactttctgagtggcttccctcccccactgaaaactccctgccccagagttcctcccagagcccgtcccctttgggactcagctttattaccgcctccaccctctcctcagtctctaggctgtcggtctcaggtgactcacccctccccactgcattctgcctgcccccatgtcctccctcattccagccctggtcatcccacaggggaacagccacgagttgccgctccctcccatccctgtcctcccgcctgccacctgagccaggccccgcctcgcccctcactgtcctcgttctctctcacagtcaggaaccttccgtggctggagggtggcagaaagactgtttggtgtctcctatatcctcaggtctccacagcactgttgctagcctggctctgggcgtgaagcctgtgctctgaagctgcattttcccggcagcaggtccaggcttccccagcccyggcagcattgtttctgtcccccatcacatctctgtgtccctacttctcactctaaagggccttgccctcttttcccagtggcctcccttstgtcctctgaggcagagcccttcacgtcctcgccagtctctcttcctccctccctccctcagctgccctaaacacagtttctctgcccactcggagggctgtggccatgttggcctcgcccctgacagccagtggctatgggtttgcacagtgagccattgatgagagacyggcacttgactctcatttccttgttccatcagaacgctgtccaactgggcgtacgagtttgacaagtgggccccctccgtggtgaaggtgtcttacaaggtaggtcacagccactgaggtttcctctcttgctacggaggtgcaggcggtggtgggcaggacgtccacacatacctctggacagtgaacctgagaatgctgggtctccagtcgcatggagtctccaggacagcctggaactccagtcacatggatccgggagtttggactgggcagggacagggcagattagctcactggggaggagacaggagtgagcatggtggccagcactcagaggccagctcaggcgcctgagatggggacccaggaagaggggagcctgtcagccaccaggaatgtgcagatggcggtgcaggctgcgtggttccctcaggccccggccgccgctggcctgcactgcttcctcttccccctgcagcgcgtgttctgcgtggtgaggtctggggacgcgccagcggccctgccagccyctttccccactacccctgtgaggacgagccctcccgccgtgtcactgggcagttgcaggggrtgcctgtgcccctcttgccacctggccacccggctccaaaagccgagctgtgcatcctgcttcccttgcagggatccccagcagcaagacgggcctttgtcccccagctccggagtgggaagttcaacgtcttgctgacgacgtacgagtacatcatcaaagacaagcacatcctcgccaaggtaacgtgtccctgtgggaaatgccaggccatgggccgagtgctcacacgtgggtcaygctgccygtctcctccaaagcccctacaagtttcttcccggagtcccacctgcatgtgcgtgaagacagctgccctgtgtaggggaaaggcctaggtgggggcgacctcaggtttacctccctaactgtctccaggcaggccctgagtcaggcccagaagctggggccatctacacagcatgcgctctgcctcctctcgggccttctgcccagagagcctcagcaccaaggcgtctcctgacccgcctacagagtccccatggggccttggccagaccagtcttgtcctcctgtctcattgccttggccgtccctccctggggccctggcttctcaccacaggccatgggctgagattcagcatgtgggggagagctcgagggccaaataccatgactgcctgctggccttgggcagctggttcgggctgttctgtgagggtcctactgtcctggaagcctcttctgggacgaaactgtgaagggagtcccagcgtggccatgactgagaatacggcccagatagaaaacagacatagccctctgcctccaaaaactcatgttcctcatttgaggaggggtaaagatgtacctggtctcacccctaaacatccagctgagtgagtgttgaacagtagagagttttttgcgttttggtttttttttttttgagaccgagtctcgctctgttgcccatgctggagtgcagtgatgtgatcacagctcactgcaggcctgacctcctggcctcaagcgatcctcccacctcaccctcctgagtagctgggactacaggtgtgcgccaccactcccagctaacttttttaaatttattttttatggagatggggtcttgctgtactgcccaggctggtctcaaactcctggcctcaaggaatcctctcgccttggcctcacaaagcactgggcaactgtgtctggcctaacagtagagttcttgacccaggtatggggggatggaggagctgtttatgggtggctccgcctctcagtgcatggctggagtgacagtactggaatactggggctgtgaactgggtgttttcttttctttttctcttcttttttttttttattgagacagagtctcacagctgtcacccaggctggagtgcagtggagcgatctcagctcactgcaacaacctctgcctcctgggttcaagtgattctcctgcctcagccttccgaggactgggtgctttatcccggagccaacaagggaggaaactgaggcccagggagctgggtatcccacgtgcaggctcttacctcaggtccatgcttcaggtgcctcctttgtggctcacccctgctgactccttacaaagccaggccgttggcaggcacaggaaccaggctctgaaaccccgtgctcccctgccagtggctcagttgatgtaatcaccctgcagtgggagtgctctttgagtgcggccactgcgccccctcccgacccgcatggccctgtatgtagtggcgctggcccctaccccatggggcccacattctgaaccacaggctgctcattagaaatgtaccgtcaccaacccagttcccctgagaccctccacaccagcaggacaagtcccccagtcagcaagatgtgtcttctgccagaacgtgctcggcatttttctgtgctgtagattcatatgtgtgattttgcagggaagccagattgcttttttgcaatttgcattgttcacctgccaatagtcatggggtcacgggcctgtctctgcccaaggcttgcaagaggctacgttgtgtggctccaactcggtgagtcagccccggggcaggacgtcaggcctgtgctctccacccagctgcgctcttccacctggagccttcctggctgctgggcgcagagtgggagattctccccatgtgccgggccacctgctgccccctgccctgattgcccactctggggcccgcagatccgttggaagtacatgattgtggacgaaggtcaccgcatgaagaaccaccactgcaagctgacgcaggtgctcaacacgcactatgtggcaccccgccgcctgctgctgacgggcacaccgctgcagaacaagcttcccgagctctgggcgctgctcaacttcctgctgcccaccatcttcaagagctgcagcaccttcgagcagtggtttaacgcaccctttgccatgaccggggaaaaggtgggtttgcccagctgtgcccatgctgacggttccaggtgcggctggctttgctggttggaacgtgttgagcaccagctayagctggctgggcctgtgctgggtgcctggtgagagtctgcatctgcatggagcaggggagccctggaacccaaggctggggcagccacaagggccccaggggagcagggcagaggtcatggtggtgaatctcggaatgctcggggcgtctctgaccctatgctccaggtgcagagtggatggtgaggaagatggccctgaggcagctgtgggaccgcaagcgtgtggagagcacagctagaggctgtagcgtgctgtaggcccctttaggtgccctcagaactcaccctcagggcagtgggaaggaaacttggaagattccagttagcggggccacatggtcaggttctgtcttacgttgttttcaaaaagctcagtggccagtgtgtctcaatgtctgggtggcaccatcagccagactgtggcatggcagcatcatcattgatgagtggtcccacaccagcactgatccctgagcctagagctccttgctgttggaggttgaaactgtgggacagactgtgtttcctgctgaggggtttaagtaaccagatgctgaagtgtgggcagaactacagaggttacctcgaagtgccctgcccagcacggctgggcccacccccttcttcccaccttagacaggtccagggcagctggggccttcctggcctcatgcgtgagttccctgccctctcggctgctggtcaaggcagagactcttctgatggcgaaaccgaggcattccccaaagcctcgtgataaaggagtccccaatttttagactcccgggacccccacactaagggccaggatctgatgctatagttttgtcactttctgagccgagcaaaagctctgccaaaggattgccagggaagcaatagaagaaaagttttggcgtcgtctcattttcctttaacttttttaattaaaacattttaaaagttaattattagtagaggagtaggcgccgtgggaggtcagggtttctttcacctggttccacccaggctgaatgagagtcccttggggctcccggtggcagagccctccctgagaatcacccgctataagccccatgtggtcagcctggcccctgcagygctcctggcatgagcttggcgtggggtgggtctgtggacactccagtttgtgttactcgtggagaagcagcatgcccgctgccgggggtctttctggtgaggcacagggagcagagtgctctgggtactgcggttccatgtcccaggaattacatggagggaaccagatcctcacagtttcctaaggaagagggtgccctgcctggctcccagaaagcataaagcaggctgaaaagccacgtgccaagggcaagatcaccccrggggaccccgtccaccctgtccccacatccgcaccttctagtgagacctctgtcgccctcctttggaggtaacgcttgcttctcctgtcttgggggcttccaggtggacctgaatgaggaggaaaccattctcatcatccggcgtctccacaaagtgctgcggcccttcttgctccgacgactcaagaaggaagtcgaggcccagttgcccgaaaaggtgatggagttttgaggggagccaccagtgaagcagcctcacgtgggggctttctccagggctgggcgtgctcagggcctctccccacagtcccaggcctgccctggtcaatccagcttgggggtggcgatgacgccactgggtctgtaaagccctgtgctgctgttgtagggattgaaaagcactcataggctcacatagctcacaataggttagagcacaaaatcccacttcctgtcagggggccaggtgcctgtgcgggctctcctggccacatcaggaggggccgtgggcttggggttgccccccggccccccatcatggctctgggttttcaaggcctgctgcagccacacccctgggcccagttcccacagcaagacccatggactcggggtccccggctgcagttgtccctcttggctctttgtttcctggctggctgtagagaggcccccagaagatggctggggggccctttctggcccagtaaccctctggtatctctgcctggtgcttcctctcattgcccaggtctcccctcttctccccagctgtgagggtctcctcacccacaccccagtgtgctctggtcagagctcatatgacagggccgagggggtcagagctgggttcggatggggggagtcaggcctcaagccaccttgggccctcgtgagcattatgtgtcccctgcaggtggagtacgtcatcaagtgcgacatgtctgcgctgcagcgagtgctctaccgccacatgcaggccaagggcgtgctgctgactgatggctccgagaaggacaagaaggtgggccccagagtcccccaactgcattccccactgggtgtccaaggccggcagcgtggcaggcagagcagagcrtgctctgaccatcgggtcatgatctggtcatgatccccagggcatctggccagccctggttatgatggctggtggcttgtgtcaggacacactgactcagctgccagtggcttctcctttgcctatgaaacactggctcsttctgcaattggcagcctgggcccagcactaaccccagcagggttagagtgttctagaatgccccccttctctgttattaagtgaaaggaagggagcgggctgtctcctgcaggggctgctctgagaatcccaggccccaggccccacctgcctggctctcctcaccagcagtgaaattatcctcccaggaaatgcaccagaccccttgattctgcccccaaggccttgacctcggcctggcttccccgagacgttgtgtctgtgccccttctcccctgagctgagcagcagtgtgttccctagtccattcccagcccagagcatgcaccccccgccccgcccccacctccttcctcatcctggagcccagggagccctgagtcatggctcacccggctgaggccctcttgcccagctgagaccctctagggacccccacagtaacagtgcccagaacaaagctggcatcacaaagcatcggggactctgcctcagccctttgccagtcttgtttccgtcccgtcctgctggccctgtccctgccatctgccctctgctgtgccaggcagtcatttgtttcccagggcttgttgggggcctccgggcctccagcctgccatctcctcactcccaattgctgtgccaaaagccactcttccccactagagcgtccccatggcccttctcccaacacccacccatccaccaagcccaccccaccccaggagggcaagaccccatttgggtccctctcatctgccttccagggcaaaggcggcaccaagaccctgatgaacaccatcatgcagctgcggaagatctgcaaccacccctacatgttccagcacatcgaggtgagcccgccgcggctgggacggctcaggscctgctgtctgctgagctcctaggcagagctggcttctcctcgacagctctttaaaaacagactcgaatattttcattaggtaatgcctgtacatctgtytctcatttggtcttcgcttcaccagtgcktacgggaagaatcccagcagttagggcgcaacgtgcgataggaatatagggccctgaaagcttgccctcagagagcaggagcgtttggagacttctctggggatgtgtccccccacagtggggtcctgctgcgtctctttggctcactggcttttctcacgttgcggggcgtcaagagtcaccaccgtcttcagtgaagtgtgggggagtcagaaccctttttggtcatggtggctttgagaatctgggttcttagaagcatgcatatgttcgtgtttcttggtgtaaagtgtcagggtcgttggagaccgcctgctgccccgagagcccctggggctgtctcagcaccctgagcgtggctgtggccccatgacgtcctcgtgcattcagggtgtgaagagtgctgtatgggatgtcctttccttcgttggaggagtgtgagggaaaggatgtcagtggactaagaaagatggttttggcatctgtgtctggtctcagagccgccgtgggccygtgccgagcacacagtgtgggggctttgtcctctgagcacgagcggtgtgtgcggacmgcagcggggccyggtggcctgctcctgcctgtcactgacccctctctccttgccttgcaggagtccttttccgagcacttggggttcactggcggcattgtccaagggtgagaagcttcccaactggatggggtgggcaggtggtccacccagaggttttctgtcgttttgttggctttattgctgctgttatgttgtccaatttcaaaggcagaaaattagaaaatacagaagaatccaaagcaaataatacaaatctttttttttttttttttttgaggtggagttttgctcttgttgcccaggctggagtgcagtgacacaatctcggctcactgcaacctctgcctcctgggttcaaatgattctcctgcctcagcctcccgagtagctgggattaccggcacctgccaccacccagctaattttttgtatttttagtagagatggggtttcaccatgttgaccrggctgatcttgaactcctgacctcaagtgatccacccgccttggcctcccaaagtgctggaattacaggtgtgagccaccgcgcccggccccattatacaaatctttagtgcttggagagctgaccactattaaccccaagagacaggattcctgaggcagacctggcttacagatcccactctgccgcctccaagctctgtgactctagacagctttcttaacctctctgagcctaaactctgctcactagtacagaggcactctttacatcatgtgggtgttttctatagcaccctttgtaaggggcagcccagactcctttaagcccctaatggatgtggatgctgtgtctagattttcaccattgcaaagaaccttgctaaaagcattcttccagctaaagcctccattcaattcccctggggtagtaagccatttgcaagaagagaggcgcctaatgaaaacatcacaaattctttttgatgtgtttttttatactgagttgtggaacagggtcctgtacacctggcttcaaggctgggaggcctggcttggacatgtggtcagccatatcacgtcgtccccctgccagcctcagtgtccacatctacaacacttggggtttggctggagagaacatgagaagccgaggtggcccttccttctgggtctagcagagcatgggtgtctccagtgtggcatttgctcctggggcttctttatcgggcaaggggacaaggtctggcttcccggagcatccctgttccagccccgtgttgtsccggccatgtgactcacagctcctctcattttcatgagtgtctgggtttgacgagaaayacatgtgccaccctggtgatacgcctccccagcgagggtggccgggcttatttcagttgggggaaatggctttgctgaagctttgggtgggtgacgtctgcttaggatgcatgtctgtgcccttgaacccggcgcctggcctggaggcgggcgatgcacctcctgccttacctgcctgcagggttccaggtttaacatcctgcgccttctctcctgcctcctccacactccaggctggacctgtaccgagcctcgggtaaatttgagcttcttgatagaattcttcccaaactccgagcaaccaaccacaaagtgctgctgttctgccaaatgacctccctcatgaccatcatggaagattactttgcgtatcgcggctttaaatacctcaggcttgatggtgagtatgagccagtgaggcgtttcttacagggttttgttgttgtggctgccacagaagctcctcactggcattccctcctgtgaggcagggtgaggcccaggcgctctgggtccagtggccagagtgggcctagccacaggctgagcatcttgggcactcggcactgggacaggccgtggattggacgccgggtgtcctgactcctaggctgacagtctttccacgacaatgctgggcgcactggggaaggggtgccctgtgcacttttagctggaagtgacagaattccataccatgtggacacaggaaagaaagcaccaataggcttacatagctctaaccccaggaggttaaacatccttcaggcacagctggatccaggcatgcaggtgatattggagagacttttctccagctctttgctctgccttcttccatcttggcttcctttccacctgctcagtgtccccaacaaaggcaggtcccaggctggctctcatttagctgctgtgagccgcatgcccatccctgggccattcgtagcagcccagtgactgccaccttgccacaggtcaggcctggacctggaatcagactctgtggtgagcacggagggagggaagcaagcactgccaggcaggagcagcagctgccgtagagaggctctcagcccaaccccctgccctgcggtccctgatgggaaaggtcaccgcctgtgtttctgcgcctgcctgccccagcacacgggagctcagggaggagaggctgtgagatgccgacagggcacgtgagacatgtctgtcagtcccagtgggtcagggagccctggagtgagttcttcgtgggagttactagaactgggcttacgagaaacacgagcatgagctgctgagacagacacggctcagccagtttgttgttccctacacgacctcccagagcctttgttgaagctcctgtgcaaggtctgtctcacagcaggacaccccagacctccataccccttktcccgttgatcacttggacctgtgtttgctgggccaacctgcccaggtgccacccggagtgtgccctgtgtgtccctccaaactgcaggtcctccccggggttctgtccaggaccactctacagacacgagtctgttgcaggggtctccccggcttgccttcttccttgggggcttcccactttcagctttgaggctgaaaaccaaaatccttcagggtcctcatggccgggccaccccccaccctttcctctcctacggtctctccagcggcttctcccgtcctcgagagggccaaggcttcctgagggccatcccgtctgtgtcgtgtccctgactcccccaggagagagcctggttcccacccatcccagtgcccttctgcctactccataaggacaaggactttggtcagttgaactacagatgtgtcctctgcatgtgatgtggtcatggccacagggccagagaatccattgcgagtagaggaagggtaggagctcagtgargtctcctgagactgcatctcccatgggtgggctggcatctgggagccgggtggcccctcacctcagcccctcctccgagctggagtagcaggggcacatctggtgcctgagagagggtgggacggcaggtggatggccaggctactgtgggcttctgcaccgtgcctgggcatgtgtaggctggtggcaggaaatggccagtttttatttcttcttttttttgagacggagtttcactcttgttgcccaggctggagtgcagtggcatgatctcagctcactgcaacctccgccgcctggattcaagcgattctcctgcctcatcctccctggtatctgggattacaggcgcccgccactacgcccagctaattttcttgtatttttagtagagacggggtttcaccatgttggccaggctggtctcgaactcctgtcctcaggcgatccacccacctcagcctcccaaagtgttgggattacaggcatgagtcaccgcgcccggcctgccagtttttatttcatcaccaaaatgacttcagtgttcaggggcacctctgtccgaactcccagcagcgcagggagtgttgacattgccttaatgcccacaacgctgagggcatcgtgggttgtcacccaggagacctgctctggctccttgacttgggttttctggggcatggggacactgatcctgccagaaaggacacgagccccctttataaggtctccatgcttttaccgtagaagattctctttgtgaaccacaaaactttttgagacagggctgaaggcaggtgcacccacagtcactgtccacccacccccaggtcccttgtgttgcgagcggcggtgttgccggcattggccgctgtgtcttccgctccccatggaatggcacagggtagagtagaggagagaatccagggctgtggtggtggtggctgtgctgacgctggacgctgtggcctagctgtgggctgggtgctggactctgtgctccaggcccacctcctctagttctcccagcggggcctgttttcatttctgggatgtgtggagagacgttttgtggtgaaacactggaaatccagttattcgccagtggcccacaggcccgtgtggagagtgcggagccagggatctggggatgctggcaggtgctgatcctgctcctgctctcagaagcaggtgttccttggtgtcccyactctacccctgaggtcaccccgctgaccctgttctcctctgtgcccgtcaggaaccacgaaggcggaggaccggggcatgctgctgaaaaccttcaacgagcccggctctgagtacttcatcttcctgctcagcacccgggctggggggctcggcctgaacctccagtcggcagacactgtgatcatttttgacagcgactggaatcctcaccaggtaaaagcgggccgggccccaggtcgaggagaaggaagggggtgcctgcaaaacctcgaggagacggccctggcttgagggtcctccagcctcctccacattgtcttggaccccaggagccgggaggagctgcacccatatctccataggtcatcagggagaaaagaggcggggtcctcctgtttcccaaaatacaaacagcctttccctctgattgggaaagcagtgtataagccatccgtcggtttggtttttcttaaatcttggaatggcacccatgaggaggtggaaagtatcctgatcaatctgcgccgtcactgtggggcggcccctgcagtgtgccctgtgagcacacacactggcgcttgttcagacacaattgggggtaaactccatgccacttcgtttacttcctcctcttgttccataaccatgtacccctcatgggcctcggcatcggtggataccaggtcatgctgttacatagctacaagaatttgaaaatgagttaaacttttctctgtgtttcattataagactgataagttcttattgtttttaacatgtaaacaccagtgacagtcaggagtcccttttcccttcctctccaaccgtgctctcttctgagcctctgccagcccatctgccttcgcacatgtatgtactgagattaacacagatgcggcgtggcctagcatgtgcctcttccaccaagcagtgggtgtcaaccgccgagtgcacatcggaagctacccagccatctaatcggccaccaggcgtcccggcagatggccacccctggacgtctgctctcaaactctggttggcaggcatccgtcttttctgttgatcagcctggtcaccaacccagcagggtccctctttctctcagagtgcttgtgcaaacaccctaggtctgcgcagccctcagacatggggtcgctccaccccagacattgtcctcttcgtgttctggttgctactgccaaagtggtttcactcctacgctggggtgtgaatgtaccctgcccttccctgcagcgtgagggcagcagcgttctcagtgtgtaaattgtcgcttgtctgatgggtgaatgccgtggtggtcactggtggccccttttacgatcaggctggggtgtagcttctgcccagaccctggtgaccagccagtttcttaggaggtggttgagttgtgtgtccccgttggcaggccggcagcaggcggaagctgcacctcagggctgggggcgcgttggggagggctggccctgccaggaagtgtgctgacagggcaggagggctgagcggcagacacaaggcactcctggtccccaccagctgtggcctctgccaccccatgggtgccagtcttaagtttcagagcatcactggtactcaccctggtcctgcagctcctgggcccagagacaggatttcgtgttagcctcctcgtactgtgctggggtgatgataaaactaacaacccaggctggacgcagtggctcacacccgaaatcccaacattttgggaggccgaggtgggtggatcaactgaggtcaggagttcgagaccagcctggccaacatggcgaaaccctgtctctactaaaaatacaaaaattagccaggcatggtggtgcatgcctgtagccccagctactcaggaagctgaggcagaaaaatcgcttgaacttcgggaggcagaggttgcagtgagctgagatcgcaccactgcactccagcctgggcgacagagcgagactttgtctcaaaaaaaaaaaaaaagaaaaaaagcccatccacggcacctgcattgttgggagctaactgcaccagtcactgggccacactcctggtgcttattcactcattcgaggtatgcagtagccacgggttgggccccatgtaggctgagggagttttgaggctcacagaggtgagacctggttccggttctgtgtgcactgtgagagtggcagggcccacagccaaaccaagcactgccacaacacggccgagcttcggccccctgttgtaaatggtgctcgactgtgtaggtccacgctgtggggagctgtgccgctgccacgggagctgcttgagaatataatcccctggggggttggtgctttcttcccgaatatctgtggggtcccaataaggtagaaggtggcacttctggaggaacgtgatgagagtccccttcccccgagggacacatggcggcccaggctccaccagctctgttttcatgcggcggcaggtcaggctgggcagaattgtcaggccgagggtggcacgcacagcacacctctccagctagtgtcagaggccaccttcccttttatgacctcctgggctcctttgggactgactggcacctcttcccccaggacctgcaagcgcaggaccgagcccaccgcatcgggcagcagaacgaggtgcgtgtgctccgcctctgcaccgtcaacagcgtggaggagaagatcctagctgcagccaagtacaagctcaacgtggaccagaaggtgatccaggccggcatgttcgaccagaagtcctccagccatgagcggcgcgccttcctgcaggccatcctggagcacgaggagcaggatgaggtgagcccagcaccggccccgacccctccccagcgtgaatggtggacgcgtgagcggctttcatttttgtttttttaccttttttgcactcttattttttttgcatccctttggagtaaagggagtgtgggctgaacggaaagaggatgagtacttgctttttctttgaagtggtttttttttctaaactgctggtgaaagacgccggattgacagccctggagactgaagtcctctatttatccacagagcagacactgcagcacgggcagcggcagtgccagcttcgcccacactgcccctccgccagcgggcgtcaaccccgacttggaggagccacctctaaaggtgagaggggtagttcagtctccatgcccattcaatcctcggcttctcggctgagacggccagcaagggccctggtcccacggagcgtgcgtgtgcgtgtgcgtgtgtgtgcctttcgctgccgtgtgggtccccatccaccgcagccgtgccgggaccaccagctcattcccacggacgccgccgctcgcctctgagctcrgccgccgcccaccccggcccctcctcagcggcactgacagtttgcaatcttataggaggaagacgaggtgcccgacgacgagaccgtcaaccagatgatcgcccggcacgaggaggagtttgatctgttcatggtaagcgctgcaggctggatggggcagttcaggcatcccactctgctgccaccaggagcaaagcagacgtcctagtgcccatggtggtatccctagcaggtcagggagccagggacagctcacagtgcagcccactcccacctccagactgacccgtcttccacccccagtctcctgaggatggcatcggagggcgagatgcacacccagccttctgcatgtgacccgagacctgccccaccagctctgttttctaacgggctctccagggcttcatgcactccctttcagagggagttcgccctatccaaggccaagggactgaccaggccttcagtcgcagagcccccttgcccctgggtgggaaacaggaaataagccacccaagcaggggccccttggcccgcaggcctcatgcctccaccaacgctgggccacgcagctgctgcccccctgctggggtctgcagccctcttgtgcaaccttccatcttttcgagtttcctctgcctcctgaggcagagcctctagtcagggtctgacggagccaggccaggtcagccactgaaaaatcgagagctactgtttaactctcgcagcagcgtggagccccacgggcagagaaaggcccttctgaactctcggtgttctggctctagcgtgcccctggtgcctgcatgctgatgcctctcccgttgcctccctgcccaccagcgcatggacctggaccgcaggcgcgaggaggcccgcaaccccaagcggaagccgcgcctcatggaggaggacgagctcccctcgtggatcatcaaggacgaygcggaggtggagcggctgacctgtgaggaggaggaggagaagatgttcggccgtggctcccgccaccgcaaggaggtggactacagcgactcactgacggagaagcagtggctcaaggtacatgctggagaggcccagcagctgccgcaggccagcgccagrcagggctggggagacaaagggcccaccgccaggactcaggcctgggtccaaaatgctttccttgggccactcctggccaggctccgcaggcagccgagagccttccgatgtgggccagggatggtcaggtccttttggctctgccttggaatgcaagaaggacccacggttcctgagcagctcaaaacctgctgctggttatggttggtctttcaagtaaaagggtttacctcttcccgaggttaaaaatcatgttgctgatctcagtggactgctggctttcccagtacctgccaggagggaggcacaagggtgaatcatggactattgaggcgccctgcaaagcgttgcactgctggctgcaggcagcctcactttgggcaagtccccccccatgagctggggagactcagtcatggggagggaggagagggcaagcccccaagggcctctgaacctggcaggtgctgcacggggctggcagytgcttgtggagctgacgtgagggcccgttctcagcagatggcagctggccctgcaacagcagctgcagatgtctttgagtcagtcgtgcggtgctcctggggcttcacccgacccaactttcccagcccaaggcacactgtgacagatgcctggcactgaygtcctcactggggttacggtgacagatcagaccccttcccagctcaggggctctgagttatagagacgatgattcagaatccatccctgaagttgtgtcataaaaatgtcctgaagcaataattccgagaaggcaggtggcagcttttggctatgccatgcaaagtgccacacccaggaaagagccatgtggcctagcccatgtggccaaacagccccggttccctcctgggacctcagcagcccagactcatgagcttgcctgccaagctgtgcaccagagggcgctgttgaaacacaccaggagcccaggtgacagacaggccatcctgttccccagccagcctcccaagcacagcgctccaggacccagaagagaaaccctgaaaagacagtgtgagccctgccacagacctgtgtgacagcagagctgtttggctgctgtatgagtgtcaccggccctgcatttttttcttttttaataaagacaaagtcttgctgtgttacccaggctggcctccagttcytgggggctcaagtgatcctcacacctcagcctcctgagtagttcagactacaggtacacaccaacacgcctggctaattttaaattttttgtaaagtgggggtctcactgtgtcactcaggctggtctcaaactcctgggctcaaacaatccacccgcctcggcctgcagagtagctgggattacgagcatgagccacggtgcccagctcagccctgcatatttgaggcagtgagtaccttttaaatttaagatcagttcatacgtggctgctctatgtacatttttttctaggtgtaatttacataccatacagttcacccttttggggtatatgatacaatcatcttcagtgtatccaagagttgtgcatctctcaccacagtccattttagaacattctcatcgcccccaaaagaagccctgccccgatttgccattcctggtaattcatggattctccccagccccaggcaaccactgatgtactttctgtccatatagttttacctgttctgggcgtttcctgtcagtggagtcctacagcgtgggatgctttggtgtcaggcttttttcacgcaatgtaacatrctgacccatgatgcagcaggtgtgttgcattctttgatggtgaaataatcctgcctcgtacagatttgtcacattcggkttttctgtccattcttgatggacacttgggttgtatccactttcgggctattacaaacaatactaccgtgaacattcacgtacacgtttttgcgtgcacgcgtttctctttaatatgtgatttctctttaatatctgatttctctttaatatgtgcctaggcgtagagttgccggaacaatgttagttctctatttaaccttttgagggaccccagcctggtttccttggtggctacgccagttcacagttccaccagctgtgtatgagaattcctctttctctacatcctcagcaacccttgctgttccctcgcccgctgattctagccatcccagcacgtatgaagtgccatctgagtgtggttggatttgcatttccctgatggctaatggtgtggagtatctgttcatatgcttsttggccctttgtgtatcctctagaaagagatgtctagtcacatcatcctttacccaaatttaaaatatatttatcttaatattgaattgtaagttatttacaagtgccttatcagatatcatttgtaaatattttgttccattctgcacattctcttttcgcttccgtgatatccgttgaagcacagaagtgtttcattgtacttacagtcgatttttctttttcacctgtgccttggtgttgtatctgagaaaccatcgcctatccaaggtcacgaagacttgcccctgtcttttctcctaggagggttataatttgatctcttccatgtagatccatgtaagatccattttgagttaaattttatacatgatgtgaggtaggggtccatcttcatccatccaactggaaatccagttgtcccagcagcatttgttgaagagactattttttcccattgagcccatcttattacacagtatattcaaattcacagttgtgaaaaatattatacaaaacactgtctccccactactgttggctgtggaattggcaccacttttctggcagccatctgttgccaagtgaactcaaagccttcaaaatgctcctatggccgccatcggacatggccatgactgtggcagcctaaagcaacagaactattttctctgcattctgggccagaagtctgaacccacggtgtgggcagggctgtgttcctttcgaggccctaggagaggacccttccttggcttttccagcttctgatggttccagaagcctcctggcttggggcagcgtcaccccatctctgcctctgtcttcatggggacttctcctctgtgtccccttctgtgtcttttaagaacaatttttaaaacttaatcccaaaagtaaagacctcatttgcaaagaaggtcccattccgaggttccaggtagacatgagtctggggggcacccgccgctccgccctgggtctgcagggggccttctcctggtgcctcctgcctrctgtgccctccatgctgcttctttgacccggttgccttccatcctcctgggcccctcaggctctcagcttcccatcttctctaagacatstctgctccatcattctggtgtctctctcttccctccttcctggcacctgacacgtttgttaccccacttgtggggtgttgctgtctgatcaccatcttccttccaagggtaggggaaagggccctggctggttcaagtcacagctctgtcctcagcgccaggcacagtgcccagctcactggcacagcctcagattccctggacacctggctccccggctgcattttttaccattgggataagttattagtaccattgaaaattaatacctggggattctcttaatattgttcatattcatgttcttctcagcagttttaccatgaggaatctgtcttaaacaatgtcagttgtcaatagcgttatttaaaatagcaacaacaataaaaaaaggtggtcagacctggcagcttgtgcctgtaatcccagcacttggagaagccaaagcggggggatcatttcagctcaggagtttgagaccagtctggccaaaatagcaagacctttgtctctattaaaaaaaaaaatgccaggcacagtgacacatgcctgtaatcccaagcactttgggaggccgaggtgggcagatcacctgaggtcaggagctcaagaccagcctggccaacatggcaaaaacccgtttctactaaaaatacaaaaattagccaggcatggtggtgggcacctgtcatcccagctacttgggaggctgagtcaggagaatcactggaacctaggagttggagtttgtagtgagccaagatcgcaccactgcactccagcctgggcgacagaatgagaccctgtctctgaaaaaaagggaaatgacctaaatgcccaagaacaaggggaggctaaattagggcacgttgtgcactgaaacactaaacagacattaaaaaattttgttgtagaaaattacaggaaaagatatccatgacacagccagcagtgtggcacgtgggctacaattccagcgtggccttcagttctgcacacgtgcgtcaaaggtggggagagttctggtggtgggtggcgctgagggctgcacaacactggggacgtgcctaatgcccctgaactgtgtactaaaacatggctgctttggtaaattttatgttatatatgatttataatatatttttttaaatgcccagctactcaggaggctaagatgggaagatcacttgagcccaggagttaaagtccaaccagggcaatgtagcaagaccacatgtctaagaaaatttaaaaatcggctgggcgcggtggctcacgcctgtaatcccagcactttgagaggccgacatgggtggatcacgaggttaagagattaagaccatcctggccaacatggtaaaaccctgtctctactaaaaataccaaaattagctggacgtggtggtgggcgcctgtagtcccagctactcaggagggtgagggaggagaatcgcttgaaccaggaaggtggaggttgcagtgagctgagattgcaccactgcactccagcctggtgacagagcgagactgcgtctcaacaacaacaaaaaagaaaatttaaaaataatttttcatacaaaaattagccaggtgtggtggcacgtacctgtaatcccaggtacttgggaggctgaagcaggagaattgcttgaacccaggaggcggaggttgcagtgagccgagattgcaccactgcactccaacctcggtgacaagagcgaaactccgtctcaaaaatataaaaataatttttaaaatgtcttaaaaaggccgggtgtggtggctcacacctgtaatcccagcactttgggaggccgaggcgggcagatcacaaggtcaagagtttgagaccatcctgaccaacatggtgaaaccctgtctctactaaaaatacaaaaattagctaggcgtggtggtttgcgcctgtaatcccagctactcaggaggctgaggcaggagagttgcttgaacccaggaggcggaggttgcagtgagccaagatcatgccactgcactccagcctggtgacagagtgagactccgtctccaaaaaaaaaaaaaaaaaaatcttaaaaagaagaaatagatggaggccaggcccagtggcttatatctgtaatcctagcactttgggaggctaagatgggagcactgcttgagaccaggagttcaagaccagcctgggcaatattatgagaccccgtatctacaaaaaatttttttaattagctgagtgtggtgacacgtgcctgtagtcccagctacttaggaggctgaggtgggaggatctcttgagccctgggagttcaagactgcagtgagctatgatggtgccactgcactccagcctgggcaacaggtcgagaccctgtctctaaaaataaataagtaaataaaagaaatagatggggagagtgtggaacagaggtgtcaacatcacctccgggtgaagggatttcaggagcacgttcttttctgtacagagaagatagttctttttttttggtcaagaaattcaaccattagttttttaaagacaagcttgggtggggtgcctgctgggggcagtgctggtctttcactgcagcccaggcaccccttgagagtcccagtgtgtgttatgccccgagccagtcaagctgaagggagagcgggtgcgggggccctcctccgtgtcccagcccggcccctgggattgcgtcgcggccwctgcttgtcgacctgggtgctggctgtcctattttactactattgaccctgaaggccatcgaggagggcacgctggaggagatcgaagaggaggtccggcagaagaaatcatcacggaagcgcaagcgagacagcgacgccggctcctccaccccgaccaccagcacccgcagccgcgacaaggacgacgagagcaagaagcagaagaagcgcgggcggccgcctgccgagaaactctcccctaacccacccaacctcaccaagaagatgaagaagattgtgsatgccgtgatcaagtacaaggacaggtaagcgaggaggcggggagggcgggggctgtaggggtccccgtgggagcaggcctggcatctgcactctgactctgcacactcaggcttgggccgctcactctttcactcatccacaaacactgactgaatctctgtgtctttgagcctggccctgaggaacatgctttctggaacagggaagcacacatgtatctgcggtgatgagagggaatgtcacatgtggtcgagaggagaggcaggggtgcgggtctcggagaaggggacattgcagcagagccttgagagaggggaggttggggagagtgcaccagcagaggccacagcaggcggagaggctctgccaaagttgtggcctggtggcctcaagggatgaggtgggatgaggggttatatggcagtaatgggtgctgyccgtgtggccaggaggttggggacaagaggctggcatgtctggagcagagaaagtggcagccctctcctgtccttgcaccctcccaggctacctgtgccatctctgtgttggtgagatggtggccacactcctgctctctgccaggccctgctccaagcctggagatcgctgtcctcacagacatgtcctatatacgaggcagcatgcggttccagctgtggccacggcccagcggcggatcataacgtgttggtggatcatgagtgccatttatatgtttttcatttactaatatccttttccgtgagcgactctatatgggtaccatttaaataagaagaaaggaatgttctcagcaactccccagggaggcatgtgcaccttctgccagcccagggcaggtcacagagctgggcaggagccagcaaaggtgtaaggcccatgcctggcccaggactcacccagtcttccactctccaaggtcttatttcacttcctggtacacactggccagtacggctgtccccgtaatgggagggttgtactgtttgattttaaataacagtttgctgttagtcatgaagcagagcgtgggggaattgtatctgttggaggggaaagtgaagggagcccacatgcatggtttggagagaatcttaccaagtgtgaagttttagaggatggtaacaattggagtgcctaaattaatgagtcaaaattaccgcgcaaggccagctgtggtggtccacacctgtcagcccagcactttgagaggctgaggtgggaggatcacttgaggtcaggagtttgagaccagcatggacaacatggtgaaaacccatctttactgaaaataggaaaacaattacctgggcgtggtggcacgctttttgggaggctgagacaggagaatcacttgaacccaggaagtggaggttgctgtggaccaagattgcaccactgcactccagccttgggtgacagagcaagacgcccactccaaaaacaaaatactgcttaaaaaggttcttttagccagatgcggtggctcatgcctgtaatcccagcactttaggaggccaaggcgggcggatcacttgaggtcaggagtttgaaaccagcatggccaatatggcgaaaccccctctctactaaaactacaaaaattcgccgagcgtagtggtgcatgcctgtaatcccagctactcgggaggctgaggtaggagaatcttgaagctgggaggcggaggttgcagtgacccaagatcacatcagtgcactccagcctgggggacagagtgagactccgtctcaaaaagagaaaaaaagaaaggttcttttattattggaagagaaacagatgatgaaggaaaggagacatattcaagttcaatgccagatctgaaaatgtcatgtgttgtcagtattgagaaaaaaatatatagactctaattcacaaacctaactccaaggctaagtcctcaaagaggaaagcaagtggaggacttaagttacttaaagtgcgggatacagctgcgggcagtagcacatgcctggggtccccactacttgggaggctgaggtgggaggatcacttgagcacagcaggtccaggctacagtgagccatgatcacacagctgcactccatcctgggtgatggaatgagaccctgtatcttaaaaaaatgaaataaatacagaatacttatttaaaacatgggccaggtatagtggctcgtgtaatcccagcactttgggaggctgaggtgggcggatcacttgaagttaggagtttgagaycagtctggccaacatggcaaaaccccatctctacaaaaaatacaaaaatagaaattaaactggcatggtgatgcgtgcttgagctcccagctcgggaggctgggcacgagaatcgcttgaacccagaaggcagagggtgcagtgagccaagattgcaccactgcactccagcctgggtgacagagtgagacaatacctgaaaaacaaaaaacaaaaacaaaaaaagggaattcgcagaaatctaatgacaatgacagaccctccccatgttttatttctaatgataatcttgtgagggaaacttaacattaccaacctaaagaagacccttgaagcgcagtggggaaagcacgggtgtctccatcacactggtctcctgggtatccacgtagagaggatgagcctcgaccacccccacacacgcacacaccatgcacttggatccacgtgacatggactgtggatgtaagaacgtgaaaggtaaaacaaaattctagaagaaagcacgggagaaaatcttcatgagtaggcatcgatttcttccacgggagccaaaagccactaatcacaaacaattgagaaattagacctcactgaaattaataacatctgtttattaatggacacgctgatggagacagtgaaaactcctcatagatgaggaaaagacaacacaatttaaagctggacaagagccgggaacagacgcctccttacacaggacatcccaggactaatcaatgtggggaaaggtgctcacgtcattgcattagcatcacaacttcaagaaaatgctcgttaaaaccagagtgacttgcaccagcacccgccccagaacggccgaatgcccatcagtgctggcaagtctgaagcagtctggcctcacaccctgcgtgtaggagtatgcagctctttggcaatctcttctgttttgctttgtttgtttttaaccatcgaactgcagaagataatattttctgaggctcagcctgtacataccctctgacccagcagcctgcagccctcgttctacccaggagagctgagtgcatctgtccacaccgacagacgtgtccatagccactttggtcataatctcccaaaacaagaatcagcccagtgtccatctacaggggcatggatcagtggaggcctaatcgtacagggccccaaacagctgtgaaaacagacatagtactgctacctggaagaagcttacattttgttgagtgaaagaagccagacactaaaaagggcatactggccgggcacggtggctcacgcctgtaatcccagcactttgggaggccgaggcgggcggatcacgaggtcaggagattgagaccatcctggctaacatggtgaaacaccgtctctactaaaaatacaaaaaattagccgggtgtggtggtgggcgcctgtagtcccagctactcgggaggctgaggcgggagaatggcatgaacccaggaggcggagcttgcagtgagccgagaccgcgccacggcactccagcctgggcgacagagcgggactccgtctaaaaaaaaaaagagggcctactgtgtgcctccagttctgtgagggtcagaagctgatccacagtaatggctgccaagcagtgcttaccttgagagagggaatagcaggaaagccacacgacgagccttctaggatactggggatattctctctatagatctggatgtgtatatgatgtgtacattcaccaaggtgtacacatgagatatgtacacttctctgtattccattacaccttggtttttgaaaagacagaaacagcatgctcagcttattaagaacctgaatattttcagacaaaaagtatgtctagtgttagtccacttttttttttttttagttttagactcacagagccctcttagggtcatatttagttgtatatcatctgacaaaagagggaatggctcacccagctgctacagtcagtcttgtagcctttgtaagatttgatgataaatcatacaataaattaaaactttcggctgggcacagtggctcacgcccataatcccagcactttgggaggccgaggcggaggatcacttgagcccaggagttcagatgagcctggccaacatagtgagactctgtctctatttaaaaaaaagaagaaaaaaaaagtctgggtgtggtggctcacgcctgtaatcccagcactttgggaggctgaggcgagcggatcacaaggccaggagatcaagaccatgctggctaacacagtgaaaccccgtctctactaaaaatacaaaaaattagccaggcgtggtggcgggcgcctgtagtcccagatactcgagaggctgaggcaggagaatggcgtgaacccgggaggcagagcttgcagtgagccgagattgtgccactgcactccagcctgggcgacagagcgagactccgtctcaaaaaaaaaaaaaaaaccccaaatcttaactcttactgctaagtgactgctttatcgaaactgttctgtttcgggacatttgattctggtagagattttgagacctgctttgaagaggacaccaacatttcagtcacacagcaatgctcctgtcttacctgggatccatgtgggaggatgcctcagtgggggatttgatctgtgttttcaatttaacctcacatcttactggaatggatggattcacagacctgggggtcgcccattggactgggagtaactacgttggaattacaagtaggacaacaaagatgactattaaagaaagcctcctgagtgctggaagcacagcaggcgtgggtctgtccactcactgtaatgtgatttgcacaggaaaacatcacatagggcacatcaactcaggaaagatagtcgttgaaaagctacctcagctgggcgtagtggtcacgcctgtaatcccagaactttgtaaggctgtgaggcttgtggatcccttgagaccaagagtacgagaccaacctgagcaaaacagggagaccccgcctatgcaaaaaatacaaaaattagccaggcgtggtggtgcactcctgttgactcagctattcaggaagctgaggcagaaggaccacaagaagtcaaggccgcagtggggtataatcacatcactgcactccaccatgggtgacagaggtgagaccctgttgcaaaaaaaaaaaaaaaaaaagcaaaagaaaagctgcctccatttagcaataatttcaaacatgatgtttgggtacaaaattggtgtacttaatggatatttctgatattcttaactaaatttgaagctgtgagggaagacaaactcagggtccacagggtgggaaaagtccacaagatcaccctcaagtgccgtcattctctaggaccccgagagccctagcggttgttacgcttgcagttatgatttattacagtgcaaggctacagattaaaatcaaccaaggcaagagatgtrtggggcctcttgggggccaaggtgggcggatcacttgaggtgatctggacggttccagacacagggctttcctttgtctcctccctgtggagttgaagacagcgctgatgttcccggtgacgttgacwcagagcattgccaaccagagaagcctccgtgtccagaggtttttttttttttttggagatgcagtctcactctgtcactcaggctggagtgcagtggcactatcttggctcactgtaacctctgcctcctgggttgaagtgattcttctgcctcagcctcctgagcaactgggattacaggctcgcgccaccacgcctggctaatttttgtattttttagtagagatggggtttcwccatgttggccaggctggtctcgaactcccgaccttaagtgatccgcccgcctcagcctcccgaagtgttgggattacaggcatgagccaccgtacccaccctgtgtccagcatttttactgggacttggtcacaaagacacagctggctacccacgtggctgacctccatctccagcccctctgcaggtgagcagaaactacatagcccaaagccccaacctaggactggtcccagaccccacgtaaacaaagacagccattaggtgtgacattctaaggactcagagatcacctcccaggagccccaggcaaaagccagacctcatttggggcgaagttacattcttttttattattattattatttgcccatcattgtctagaagttacattctgtatgacacatctgtcagatccctggaagcttcctcgccaccgactgcatggcaggtggtgctcatgtcactcggcccttccttggccccacacagctgcaccaggctgagaagagcttgaatggaataaagtcagacacagctaacagctcacttttttgtctccaactttgaattgctcctttccaagaaaagaaaaaaaacttctttttgtttaattggatttttttttttatttattttttgaggcagagtctcactctgtcacccaggctggagtgccatggcacaatctcggctccctgcaacctccaccttccaggttgaagtgattctcctgcctcagcctcccaagtagctgggattacaggtgcacaccaccatcatgcctggccggaatttttgttttttagttggctctccagaaccctctaagtagttcagctctgcaattgagttaaatgtgaagcctgaaaagagactggcatctgtgtagacctgagttctaacaattcaaagagtgaacacgggacgttgtcctctggattcggtgtcaggagcctgcctcgccgagctggagagtgtgcccatgactgcaggtgggagccacatggtccgtctaggtggcgacacctgaggacagaagtggtttagctgggcacccgctgctgtgttggggccagacccttttggagaggcagggacgcccttcctgtcaggtggaatcttttcaaatattgcttttgatcgttggagatacttgcagccccctagttcgtgttttattctggcagaattgtgtttgacgtgacctctgtgttgacctcatcatacgtgtacagttgtcttgcctgggaatcttatactctgttcttctgcactcagattcacagccatgaggccgctcctcccaaggccctggagtgtggcactgccagctgtcacagccacggtcctttacattgtatacacagagtgcagtgacatgcccctcctgctcaggggccacagtaggaacaggctggagtkttctgtggtaccatgccggcagtgctggcttctgctgtccaggggcttgtggtggctccagtgggaagggccacgtaagcagaacaggaagtgtgagcagtgtccactgggaggagagggacaagtgtcccaggcagagaggacacagtgcatgcagaggctggagggaggctaggggcttgagtggggctgygccagcaccaggggcctcacaggggccctgggccacacacctgcccttagccaagggcgtttctccttggtggtttgaaatctcaaaccacattgaggaacctgccagaaatcgaaaccagaattaagaaattaagttacatgtaggagattttactttaaaatcagaacatgcagaaacgttctctgtggcttcgggtcaggttcgggcttgtggggctgtacactgccagttgataccttcttccctgggttctgtgtttttttttttttttttgagacagagtcttgctctgtagcccaggctggagtgcagtggcacagtcttggctcactgcaacctctgcctccctccctgggttctttatagcagtcagcagctggtggctgaggcatttggggcactgtgtccaagtgtcaaggccgcatgtgtgtcagggggcacacccttggtgtgcttggtaagggctcagagaagggcatctgctggtccatgtgggctcagccagcagcctgctaaagaccaccccgccagccaccagcctgcctgcgacagtgatagggcagagatgctgctacaataaagaccatgcgggccaggcgcaggcgctcacatctgtaatcccagcactttgggaggccaagccgggctgatcacttgagctcagaagtttgagaacagcttggccaacgtggcaaaaaccccgtctctattaaaatacaaaaattagccaggcatggtggcactcgcctgtaatcccagctacttgggaggctgaggcaggagaatcgcttgaacccaggaggaggtttcggtgagccaagattgcaccactgcactccagcctgggtgacagtgagactacgtctcaaaaaaaaagactgtgctagacggtggtgttgaacttgaacttgatgcttgtgctgaggtcaggagacacgtgcacagcttcagggctagaggggcacaatggctgcagactatgctcgggcagctcggaaagacggtgacgggtccaggctgccgcagctaagcctcacaagagctctggccccaccaggcgggccctctgggttccattcccactccccactgcctggaggcagcagccctgtggttactgtaggagggacctgaatgcagtgaagatctgcactccacacctgtctctgtgcctcagtctccacgtctgcagcacaggggcctgactgaaataacgtggccaggcacacagcccagacgccagcactgtgtgcactgtgggaggggaygatggtccctagcccagggcctgagctgctgccttgccaattcgtggtgacagctttggcctgggtctggcaggggctggctgctactgctgaaggcctgtctgcactgtttccctgcctttccacaagcactgtccctcctggctcttcagagttgagtggttataccttgtgcaagaaaaacaatgaaacagattgtctgaatgtttcagacctgcctgaaacattctgcaggagaggtcatcccaaggcttgaaagtgtttgtcacactccttcaagcccccagggcagggcccctgagggaagggtgcaggtggagggtgggcaggagtgggagccattccttggggacaggggggctcmtcagggctgtctggcccttggcctgtggttccaggtctatggtctgcttggcacatagcctggaccctggtgctgtgcaggcactggctggatgagggcaccgagcagatgagccccaggcatgcccacttatgggcataggctgggtgcagggcactgggtccaacataaccatggcagagggctcagggggcctaaaagtcatggatggagttgcccacgcagcctgcggtcaggttccctgtggagccgtgctggggttctgcgcctgccccaggatttgctggaagaagctccccctcctctgtttgtgagtcgggccctacccccaagtctccccctcagtgatagagacctttacataacacaaataaacaaggcaactggtttagaagaatgagtctgaaaactagaatggcgtgtttaaggaaagcttaggacaggacaattagagacagaggtgcaggtgtgtggagttggcagcaggaggcctgggggagccgctcgtgcctttccctcctgccctggcctcccttggaactcggagcagccccctgccttgaggaggcccttcctttcagtgagcctgtgccgcagtcgtccgagggaacacagtggggacatatttccttttttttttttttttttgagacagagtctcactctgtcgccaggctggagtgcagtagcctgatctcagctcactgcaaattctgcctcctgggttcaagcaattctcctgtttcagcctcccgagtagctgggactacaggcatgcaccaccacgcccagctaatttttgtatttttagtagagatggggtttaaccacgttggctaggatggtctcgatctcttgacctcatgatccgccagcctcggcctcccaaagtgctgggattacaggagtgagccaccatgtccggccggaaatgtttattaaaatagcagatgaggccgggtgctgtgactcaggcctgtaatcccagcactttgggaggctgaggcgggtggatcacgaggtcaggagttcaagaccagcctgaccaagatggtgaaacccatctctactaaaagtacaaaaattagccgagcgtagtgagacttgcctataatcccagttacgagggaggctgaggcaggagaatcgcttgaacccaggaggcagaggttgcagtgagccgagattgtgccactgcactccagcctgggcaacagagcgagactccgtctcaaaaataaataaataaaaatagatgatcatagacaggagggatgaagtagaagattcaaagcagcttaaaaaaaggaagtaaaaaagaaataaggtcaggagacaagattgagtgactgtgaaacatcaacaataggcagatttaaaataaagtcaggaaatagctagatcaaagaatagaaaggtgaaccaggtgtgatatccacctgtagtcccagcttcttgggaggccaacgcgggaaaatcacgtgagcccaggagttggaggcaccgctgcactcaagcctgggtgacacagtgagaccctgtctcaaaaagcagcaggaagagaggctggcatgtggggctccagggggtgtgaaggagggtccacaccctccttcctccacctggccatactgagcagcacattctctgagccaacggcccctacaaacacccaccctttcctcctggtagcccagagggcgcccctgcctgctcacttcccaatgtcgggatcctgtgatttctgcctcttcagaaaggacttgaggcattttctgactcagagccactcaggattccaggacctcctgtggtgacaacagggacaccagtagtgatgaattcagaaaagagcgaacgcccctcaagctgccctcccccagccctgcagacagtggccatgggcctccctgcactcaggaccgactgcacctgcctgcggcgtaggggagctggggctggcctttccttttcatcttcccctggcactgggaaatgctctgggtggtgccatgtataacaccytttgtcacagtgctctcatttcgtcgtgtaaaaggccaktccccgcctcgcagtgttggggcagccagcacaggcacgtgagacaggagccacacctgggttctcatctggcatctgcctcttgccrtgctcaggttcttgcctccagatatagggcatcaaactaagtggtttccaaacttgggttcttggtggggagtgagatcagggtttcttaaaaactgcacttggaggctgggcacggtggctcacgcctgtaattccagcactttgggaggccgaggcgggcggatcacctgaggtcaggagttacaaaaaacggaacctaggctcaygcctataatcccagcacttcgggaggccaaggctggcgaatcgctggaatttaagagttccagaccagcctggccaacgtggcaaaaccctgtttctactcaaaatacgtaagttagccgggcatggtggtgggtgcctgtaatcccagctactcgggaggcggaggttkcagtaagccaagattgcaccactgcactccagcctgggtgacagagtgagactccgtctcaaaaaaaaaaaaaaaaaaaaagaaattcaaatctcagtgtcgataaatgaagttttgttggaatgcagccaaagcccaccgatttctgcgttgtctgtggttcccttcatggaacagtggcagaactgagcagttgcaacagaggcaggcccagcaagcctcaaatatttacactgagctgagcgcagtgactcacacctgtaattccagtgctttgggaggctgatgtgggaggatcccttgagcccaggagtttgagaccagcctgggcaacctagtgagaccccatctctacaaaatattttttaaattagccaggtgttgtggcgtgtgcctgtagtcctagctacttgggaggctgaagcagtaggatctcatgagcccaggagttggaggcttcagtgagctaggatggcaccactgcactctagcctgggcaacagaacaagatcgtgtctgtaaaaagagagaaaagaaacagacaattcctagactgcagcaggtgtttgcagtagtgcatccagcaaaggactccccagggaaggaaatgggccaaagatgggaacaagcgctgcttggaagagcctgtgaaacagtgcttggcttctctgcacaacaaggaaacgtgtttagggccacattgtagaatggctacaaggacaagcaccactcacgctggctcagtatctcccaagtagagcatttccccaccctgtgacctagagtatcttctcccagataaattcctaggagaactgcaaactaaacacttgttcctgagtgtccacagacacttgcttcctggtgtccaaccctgagcacagcccagatgcccggcagygggaactgggcatggctggtgtgtgcccacctcgggacctgctgctgcactcggcaacagggacagcaaggaggcaggaggccaggccaggtttgggggctcccctgtgtgtttctgcatcatcaacttgaagaagcagccaacctcggcccaggatcatccctgggggaaggactgacaggagcgcatctttagcctcatgcttaagatctgtgcattgggccaggtgcggtggctcagcctgtgatcccagcacttttgggaggccaaggtgggtggatcaggaggtcaggagttcgagaccagcctgaccaacatggtgaaacccgtctctactaacaatacaaaaattagctaggtgtggtggtgcacctgtaatgccagctacttggaggctgaggcaggagaatcgcttgaaccctggaggcagaggttgcagtgagccgagatcacgccactgcatgatgtgtgcattggtgttaagtcagctattaagaggtgtgggctgggtgtgtgtgggggtcagaggaggtgatgtttgccctgagatgaggtcagagcccacattcccatgggggtggactcccctttgtaggccttgacacgagcatgggagcggagctaggggcactgacatcaaaggtggtggcgcctatccagaggactccgggtttcattccaagtgcggggaggctgcagcatgtccctctttaatatagaggtgagggaggctctcagcaccctgcctgttgcagggaagcctgaggacaggacctccagggaactctgcaccagagcggaatcctcagaccggcaactgggtggtcttgattcatccagaacgtaattctcctagaggtctgggaaggggtgctcttgtaccttggttttgtgttttgtttttgtttgttttttgagacagagtctcactctgtcgcccaggctagaatgcagtggtgcgatctcggctcactgcaacctctgccacccaggttcaggtgattctcctgcctcagcctcccgagtagctgggattgcaggtgcctgtcaccacgcctggctcatttttgtatttttagtagagacggggtatcactatcttggccaggctggtcttgaactccggacttcgtgatccacccacctcagcctcccaaagttctggggttacaggcgtgagccactgcgcccagccgcaccttgttttttttttgctgcctgtagctgtttctcattagcctgatggaggtggctgttggggtggtggggtgcttattataaagccttctgctgtcacagccctggggtctcacttcctgggctctctgcatagggagccgccctccagggcaagggccacagtgtgcagtaagccccccatggccacagggcagggcgtttcaagccaagagtctgcactgtttgctggccactaagggcattgaatggatcacaaaactggcttttttttcccccagtcaaatagaaatggggttttgccatgttgtccaggctggtctcaaactcctgggctcaagcaatcctcccacgttggcctcccaaagtgctgggattacaggcacgagccaccatatctttaaaaatgtaatagaatggaaaatggcaaagcgcgctgcttttcatagaagagactatcgcattggggttcttctgttgcccctgcctgtgctgcacgtcctgcttcacagtgtaaagcgcaactcttgctgtgccttattgtaacaggtatagggtggatgctgccatcatgaagagagaggagagctctttgcttataaaattccgtagagtggagaacaggrtgtgccggcttaggagagggaagaggtacaggcccrctctgcccgagctgcagatgggacacacatttcccgactcagaggggagtcgtgtctttctccagggtcaccgagcagcaagcgcatccactgtgtgttcttattttctgagcctgtggactgggtttaccaacagttgcctgtggcagagccggccaccagcccgctcataggaaaaaggaagcctgtgcctccagggagggcccacgatgggaatgcagtctgagaagggtatgtgctcccatgctggaccggctggtcccacacccaggaccaaaaacacctcctggcaggagatggggagatgtacttcatgaacacacgttggggaaggacactcctggaaggcagaggctcaaggcgggctgtgtccaggccaggagattcactcycacctcaatttcctcctcagcacggctggcctggcactggtgcctgcttcagagtttagtgtgtgtaaagtgtggctggcccagcaagcaggggatgatggcggttgtcaaggccaggggaggtgcagggacaggattctggctcccgtgtgtaacgtctgcatctcaggaggctctcatgttagaagctgggtcaggggcttcgtgatgcacacaaacaccaaacaagcaggaggccttccgggatcctgctcacgagcagcttcctggaggcaagcctggcccgtctgccccttggtgacatcaggaccccagcaacagaaccagggaagccaccatgttgtcgctgccattttccagcgtggtaaacagaagcaagacaaggcgcactcaggacacccaaacagacrgcggggccagccagtggcatgggcgggctgccctgccctctggaattttctgggaaagaacataaggaaagaagcggtgctgatgaggcagctggagttatcaggacccaagctcagctcctccttcccatcaggccccgttggccacttttaggcttcgtccgcctggtggctccctgcttggggccgttccctggctaggcccttcctctgggccaaagcagagaggagagcgcgtttgccatgcgttctcattttcccagcctgcgggctgggttctgtcagagcaaggtcagctctcagagcttctgtccccacccaccctgtcctsctgagccaggctcaggtatgggtaagagctgggagcgctgtgcacgaggcctggcagcatctcatcacygccgctgtrccgagtgcacaagggcgcttcctgtggtgttcagggggttagatcagtccccagtgaggacagagcagagatccagatgcatcccaggccggctgcagtggcttctgcctctaatcccagcacttcgggaggccaaggcaggcagatcacgaggtcaagagatcgagaccatcctgaccaacatggtgaaaccctgtctctactaaaaatacaaaaattagccgggtgtggtggctggcatctgtaatcccagctactcgggaggctgaggcaggagaattgcttgagcccaggaggcagaggttgcagtgagccgagatcattccattgcgctccagtctggcgacagaacaagactctgtctcaaaaaaaacaaaaaacaaaaaaatgtatcacaggcctgtttgtgtggttgtctctgggaaatgttccagaagctacaagaaagcacatgtgcaggccaggcatggtggctcacacctgtaatcccagcactttgggatgctgaggcgggctgatcacctgaggtcgggagtttgagaccagtctgaccaacatggagaaaccctgtctctactaaaaatacaaaattagcctggcatggtggtgcacgactgtaaaaaatcccagtgactccaaaggctgaggcaggagaatctcctgaacctgggaggtggaggttgcagtgagccgagatcgcaccattgcactccagcctgggcagcaagagcgaaactccgtctcaaaaaaaaaaaaagcgcatgtgcaagaaatagctcctgagctgagttggaatttctcatccttaaacaatgtgggaacctgctgaggtggggtgggggctcccgggtgggcggrctcgggggtgatagccgccggttctgccttgcagcagcagtggacgtcagctcagcgaggtcttcatccagctgccctcgcgaaaggagctgcccgagtactacgagctcatccgcaagcccgtggacttcaagaagataaaggtaaccctgacgttgtacctgcgccccgcatgtgcccggaggggagtctgacccaggggcacccccatctgagagctgtggtgtgtgggcagaatgaccagaaaccacctaggcggtgccttgggctacctggttagggacctggtcgtgggcttttggggttccttgtaagggttgggggtgtcctgagggatgtcagtgggcagtcggtgttgggtgttccttcaaggtcccactcacttagtgctgggcctcagtcatgcagytcccatgcctagtgagccaggttaccgaggctggcgcttcggccacatcctcataggcacgaggaatcctagcccktggggtctccagcacacagccaggcctgcgggcaggcgaggcggggtcctgaggtaagacctgctcctcccgtccactgcaggagcgcattcgcaaccacaagtaccgcagcctcaaygacctagagaaggaygtcatgctcctgtgccagaacgcacagaccttcaacctggagggctccctggtgagggcaccrctgggggttggggatgggccactcccacagctgggctttgacccaacccgcccctccttcccttctgaattgatgggttaaaaacaagtcccgctagctgtggtggttcgtgcctgtaatcccagcactttgggaggccaaggcgggaggatcacttgagaccaggagttcacgaccagcctgggcaacataacaagaccctgtctttaaaaaaaaaaaagaaaaaattaaaaatttccaacttgggatattttagcaattacaaaagcagtatgtatttaccgaagaaaataaagataggcacaacagaagaaatagactcagagtcctctgtctgttggaattttattttaaattccctggggcacattctcttcaaaggaatcctgtgggtttgttctttcctgtgatagaattgacacatacacagcctcaacttggcaaactttcttaagtgtctttgggattgattcctctcagaaaaaagacttgactttgatgagtttgggaaagatgctggcttcaacaaggggcatgtatttccaatgttattgcagacctcagagattgtgcagaaggagggaggcacctgcagctattcccaaaccagtgtgcctgacctttcaccctggagcatttcagaagtctgatgctcgggcccctatggaggaagattatggagagggccttccaccctgggtgggctgaagccccgacccgctgaggctcgcattggccactgatcagctgtccaggggcaacacagggctggggctggggctggggccagggccgggcaggcagccctccagtcgggcccatccactcaagcccctggtgtctctgcccagatctatgaagactccatcgtcttgcagtcggtcttcaccagcgtgcggcagaaaatcgagaaggaggatgacagtgaaggcgaggagagtgaggaggaggaagagggcgaggaggaaggctccgaatccgaatgtgagtcccrggggggttcaggacgccggggttcacgctggcccgagagcccccaaggccccagcttttcacagccctcccggctcccagacgccccttgctgtgggggtgctgcrttcccagagctcaaggctgtctttccctcccggtcccctccagctcggtccgtcaaagtgaagatcaagcttggccggaaggagaaggcacaggaccggctgaagggcggccggcggcggccgagccgagggtcccgagccaagccggtcgtgagtgacgaygacagtgaggaggaacaagaggaggtgaggccgggcccccgagcaggcagagctggcatgtggcaggaggcatcccggggccctgatgggacagccctgtggggcggtgctcccacgcccccacgctgcaggtgggaaagctgaggcttgacctgccatggctgaccccaggtcacacagccagtatgtggcagggctgccactcaaagccaagcctgtgtgaccccggaaccagctctcagtacccgtgggtgtctggggactgggggacacgtgagtcctcaggacaggcagcaggcggtcccagggcaccagggctcctgggctgaggccgggcaggccagggcttgattagggttgggtaggaggtgctaggattggggacccaccagacagtgccccgtctcctcagtggcatagagaatgggcagaaacgccaagmccacagtggatagtttttggggtgcagtggggagccggagaagatccacttgctggctttaaataatctcacctctgtctctggcccttcctggctgtgggacctggcaggtcactttgcttctcaagcttcagtttcctcttatgcaaagcaaggaggctgcatggattagggggctgcccccaccgaagggcctggctcccgctgaagcccagcgaatgccattttgtcatcacagaagcagcaaatttcagtgcctgggaattagtctgacgaaagacgcacgtgacgtttgaggacattcatgaagtcctcatgtggaggggaggcccctgtgtcaggcaggagggtctgggctgtgatgctgtctctcttgcctaatccagagcagggtgttttatggcccatgccaggctgtttaaaaaggttttatgaggccaggtccagtggctcacacctgtaatcccagcactttgggaaactgaggcaggaggctcacttgagcctgggaggtcgaggctgcagtgagccgtgatagcaccactgcactccagcctgggcaacagagcaagaccctgtctttaaaaaaaaaaaaaaaaatatatatatatatatatatatatatatatatatatatgaaagagcaaagatctttcacagtcaggaagaaccaagatggtttggaagctgtaggtcaggggccaagggccaggcaggtgacatgggacagagcagggaaggcacgtggagcctcgaaggtcccgagagggccgagtgtggtcacagggactcgtcctgtagagaaacatgaagtttgggcatggccatggcgccatctcggctcactgcaagctccaccccccgggatcgcgccattctcctgcctcagcctcccaagtagctgggactacaggcgcccgccaccacgcccggctaattttttgtattttttagtagagacggggtttcaccgtgttagccaggatggtctcgatctcctgacctcgtgatccgcccrccttggccttccaaagtgctgggattacgggcgtgagccaccgtgcccggcccacatcagtgttttcttgagcaagtttatttaaagtttggcaggtccctggcaaggtgccctggcaggggtggccaacgcacactctctcctcctgtcccctctccaggaccgctcaggaagtggcagcgaagaagactgagccccgacattccagtctcgaccccgagcccctcgttccagagctgagatggcataggccttagcagtaacgggtagcagcagatgtagtttcagacttggagtaaaactgtataaacaaaagaatcttccatatttatacagcagagaagctgtaggactgtttgtgactggccctgtcctggcatcagtagcatctgtaacagcattaactgtcttaaagagagagagagagaattccgaattggggaacacacgatacctgtttttcttttccgttgctggcagtactgttgcgccgcagtttggagtcactgtagttaagtgtggatgcatgtgcgtcaccgtccactcctcctactgtattttattggacaggtcagactcgccgggggcccggcgagggtatgtcagtgtcactggatgtcaaacagtaataaattaaaccaacaacaaaacgcacagccttgcctgcaggtggacttgtgcctggctcccaccgtttctgccagcaggagtggcgggggccacctcatgtccaggtccctgtccttctcctggcaccagaacccatggggcccgtttcacagaggaggatactgaggccccggcaggggaagaggacttgtctggtcacacgtgtggcctttgccactgcaggtctccagcatttgttcagctgagacctacagtgcagggagcaggcagctccatccgttccctgcccgtggcccagcctgggttggggagaccatcacagaaatgggcagatgccacatagagctctcagggccatgatgcaggaagctcagggcataatgggagcccaggtggtcagtgagggaagggacggagccgcctgctccctttcaaatccagaacataatttgagtttttgtttttttgttttgttttgttttgtttttgagacgaagtctctgtcacccaggctggagtgcagtggcatgatctcggctcaccgcaacctcagcctcctgggttccagtgattctgctgcctcagcctcctgagtagctgggattacaggggtgcgccaccatgcccagctaatttttgtatttttagtagagatgggtttcatcatgttagccaggctggtctcaaactcctgacctcaggtgatccacctgcctcggcctcccaaagtgcaaggattacaggcatgagccactgtgcccagcccctaatttgtgtatttttagtagaggcagggtgtcaccatgttggccaggctggtctcaaacccatgacctcaagtgatccacccaccttggcctcccaaagtgctggtattacaggcatgagccaccgtgctttgagtttttttacagtaagtcttggccggagtgcagtggctcaatcttggctcattgcaacctatgcttcctgggctcaagcaatcctcccacctcagcctcctgagtagctgggattataggtgcacgccaccatgcccaggtaatttttgtttttgtttttgtttttggtggagacagggttttgtaatgttgcccaggctggtgtcaaactcctgggttcaagcagtccacccgcctcagcctttcaaagtgctgagattacagacgtgagccactgtgcctaaccaatttgaattcttatcatttttgtctgttcattaagagccattattagtgggtcactgtcgtcatacttggctttaattcttgagatgtggtttcttctagctctttgaacctttttttttgttttgtttttaattgagacaaggtcttgctgtgtcacccaagctagagtgcagtggtgtcatcacagttcacaacagccttgacctcctgggctcaagtgatcctcctgcctcagccccctgagtagctgggaccacaggtgcacaccagcacacttggctaattattattattattattttttttgtagagataatgtttcgctttgttgcccaggctggtggtctgaactcctgagctcaagtgatcctcctgcctcagccgctctattttttttttttaatcgagacatggtattgctctgttgcccaggctggagtgcagtggtgggatggtagctcaacttccagagctcagatgatcctccctcttcagcctccagtgtatctgggaccacagacatgcaccacccagcccagcttgaacctgtttttagtagctgctttgaagccttttggtccaacatccggatccattcctccacagaaaggttctgttgactcctttttgtcctcagcgtaggtcacactttcctgtttcttcacatgtctggcaagcttttgttgtcagaaagtagacattgtatttttatttatttgtttttaattttgttatgtttttgagatggagtctctcactgtcgcccaggctggagtgcagtggtgcgatctcggctgactgcagcctccgcctcctgggttcaagcgattcccctgcctcagcctctggagtagctgggattacaggcacccgccaccacgcccggctaatttttgtattttgtatttttagtaaagacggggttttaccatgttggccaggctggtctcgatctcctgacctcaggtgatctgcccaccttggcctcccaaagtgctgggattaaaggcgcgagccaccgcgcctggccttgttttgttcttaattgttgtttttcttttctttctttcatgtttcccctcggagacaaggtcttgcgctgtcactgatgctggactgcagtggtgcagtttcagctcactacagcctcccgggctcaagccatcctcccacctcagcctcccgagtagccggaactacaggcttgtgccaccacacccagctaattttttttttttttttttttttttggtagagacagggtttctccatgttgcccacggtggtcttgaacacctgggctcaagtgatctgcccgcctctgcctcccaaaatgctgggattacaggtgtgagccaccgcgcctggcccaattctcatttttatttagaaggagtcacccctgggtcagccaagctgagacatcagttggtggttggtcagaacttgtgcccaaatatgctgagtcagcggctctgcccgggcccaaatgctgagtcagcacctctgcccgggcagtctgcaggctggccctacctttgctttctgcctgtggttcctatcagggcacgcacttcagttctgttgggcagggagacgtgcatcagactctctccagggcatatgtgctgtcttgcgcttgcgcgtggcctcccaaacccctagggatacctggggccagctggggcagtctctgtctcgacctccttttccatttctggctagtttaccaatctgtttcatccttaggccagctgatgaccttggccctctcctcccgagatccctgcagcttccaacagtgaggccctccagcagtgaggctgctgattttcatggcctggctggagctgggggcccaggccaggagcagccccaggcaaaaatcacctcccgctgctcttccctgccactcagtactttttctggaataaacatttcctcactgggtgaacacctttgacgagatcttcacagtcctgggatggttgctttggacaattctgtttagctttattgttgcttttagggagaggatttgccaagatcttcactccaccatttgggaaaatccacatttcgtttgttgcaatagctttggctttattttaatagattataatttatttattttttatttatttatttttgagacagggtcttgctctgtcacccaggctggagtatagtgacatgatctctgctcactgcaacctccgcctcctgggctcaagcaattctgccacctcagccttttgagtagctgggattacaggcgtgcaccaccatatctggctaatttttttgtatttttagtagagacaggattttgccacgttgcccaggctggtctcaaacccctgggctcaagcagtctgtccacgttggcctcccacagtgctgggattacagatgtgagccaccactcccagccagaatttattttaacgtttatggaaaaccaactcaccaaacctatgatttcatggttttcagaatgaggccaatttaaaaataagtgccttagtctgggggtgttggcccatatccataatcccagcactttgggaggctgaggcaggaagattgtgaagattgcttgaggccaggaatttgagaccatcctagacgacatagagrccccccatctcaacaacaaaaataaaaaaattagccaggcacagtggtacacatctgtagtcctagctacttgggaggctgaggcaggaggatcacttgagcccaggagttcgaggctgcagtgagctgtgatcccaccagcgcactccagcctaggagacagaggaagaccctgtctcaaaaaaaaattttttaaggaaaattttttaagaaaaaaaatgaggggagcctacagaaataactttgagtgtccacctgtgcaaaacccatgtcatggggacacagggacatgttagctgtggtgcagatgagtggtccgggctgcaggcctgtctgactcaggtctcagacatcggctttggcctgagggcctggaaccagcttggtccccatatggcagtggccccaagccaggggccttcacctgtgtgacctggtgacagctgctggctggctgctgcccttcctgacctttgctctccacacctgcccctctcgcaggcctttcctctgtctttcagtcccgctggccagtgcccttctcccaacaaccccaagggctgggggacttcattcctgtttcccagatgacacaagtggagctcggggaggttgagccagtggcctaaggctacacagatctgagcttgggtttgggggacatgagactcctcaggggctgccacctgctctggggtctggagcaaggaccctgagacttgaaagttgaaatggcgcctggaaccaggtggtggactaagcaatggcgggcaggtcggtgtgtccccaggagtcaggagaggctgccacaagacaggagtgagcaggaccttaaagctgaaacgccggatggtcagggcatgatgggacctgacacggcctggactaggagggggtgggaagaataatacgggacatcatatgtggcagggggtcatgcgctttcccatccagccatctaggctggctctcctagattctttttgttttgttttgagacagagtctcgccctgttgcgcagctggagtacagtggcaccatagcctctcgagtagctgggacgacaggcgcgcacccacacccagctaatttttgtattttcagtagagacgtggttttgccatgttggccaggctggtgtcaaactcctgacctcaggtgatccgcctgccccatcctcccaaagtgctgggattacaggcatgagccaccaggcccggcctctcctagagtcttgcttccatcaagtcatggagtctccttttccttccctggagtttgagtgtacttgggactcactggtaaccaacagagttcaatggaagtgacatcatgtaactactaagagtaggtcacagaaagcacagcttccgccttgcttgctcgctcactcttgaatcaccagctgccatgtaacagcctgacttcctggagcctgccattttgtgaggaggcccaaccaagcccatgctataaggccaccaagaccacgggaagagaaagcaatggctgccccagccctagccctcagctgtcaccagctgcatcagagaccctgagcccgtaccgccgagctgagcccttcccacattcctgacccttagaaaccacaagagctaataaacacattgttttaagccactaagctgttaggcagcaacagtactggaacatcataaaataattttttaaatgacagggatctaattaaacgtggaaggatcttgagaacattgttgaggatagaacagcaggctgcacagtgaagcaaatgtccagcaagatggacacacactggatcctggatatgtgttctggaccatgtcactagtacatcacatttagagaaagctgtgtcaggacccaccccaaacacaaaacagcctgaactgctgctgttacccttggcagtgggggagggaagggtggcgttaagagattccccaagatggtgaggtcacctggccattttattttttatttttattttttatttttgtatatatatatatatatatatatatatatatatattttgagacagagttttgctcttttgcccaggctggaatgaagtgacgcaatctcagctcactgcaacttttccccccaggatcaagtgattctcctgcctcagcctcccaagtagttgggattataggcacccgccaccacgcccagctaatttttgtattttta

SEQ ID NO: 95466 - DNA, 16332 bp, Homo sapiens
tggcgggcacctgtagtcccagctacttgggaggctgaggcaggagaatggcgtgaacccgggaggcggagcttgcagtgagccaagatcgcgccactgcactccagcctgggtgatggagcaagactctgtctcaaataataataataataataatttagatggggtctcactgtgtcacccaggcttgtctcaaactcctgggctccagtgatccacccacctcaacctcccaaagtgctgggattacaggtgtgagccaccacacccggcctattattattatttgagacagtcttgctcttgtcgcccaggctggagtgcagtggcacgatcttggctcactgcaacctctgcttcccgggttcaagcgattctcctgcctcagcctcccgagtagctgggattacaggtggctgccaccacgcccagctaattttttttgtatttttagtagagatggggtttcaccttgttggtcaggctggtctcaaacacctgacctcaggtgatccgcccacctcagcctcccaaagtgctgggattacaggcgtgagccactgctcctggccctgtcttttaatttttaaagggtagggggcaccatgacccatctttgcccacctaaaccacctattcagcagcccatgccccgcagcccacagctgggggacatcatgcaaaatctaagtcagatctgtccctctgatcagaaccctctgtggctcccaccttacccagataaaagcccccttccctgcagcccccaagagcacacgcaacctgccccacccacacccttctctgttccttgcccttgaccttgcagactcaaccttccggattcacttcccccttgctcactctgctccagccacaaaagccaatttttggttcctcaaatcaaactaactcatgacagcattttgaattttgaagccttggggccccgaaaaagtccatcttttttttttttttttaagatcgagtctcactgtgttgcccaggctggagtgcggtggtgtgatctcgactcactgcaacctctgcctccctggttcaagcaattctccggcctcagcctcccaagtagctgggattacaggtgctcgctgccatgcccagctaatttttttgtattttagtagagaaagggtttcaccttgttgcctaggctgatcttgaactcctgaactcaggcaatctgtctgcctcagcctcccaaagtgctgggattacaggcgtgagccactgcgcccggcccaaaaatccatctttgtgggttcctttgtaaatgtgtagtcaatttagaaatttagaaacacggtttcccttaagcctttatttagttacaatcacaactaacatgttacttatacacctggcaaagtgaaacatcaaaaaattaattcagggcctggcctcaggcctgtaatcccagcactttgggatgccaaggcagacggatcacttgaggtcaggagaatcgcttgaacctgggagacggaggttgggacgagctgaagatcacaccactgcgctccagcttgggtgacagagtgagtgagactccatctcaacaaaaagaaaaagaaatatcactttaagaggtcattggatgcatatttgggtccgtttataagtttagtggattgaaattaacattttacattttataagtgtgatgcattttattctatactcttttactactataataataattattattattaattttttttttgagatggagtctcgctctgtcacccaagccggatggagtgcagtggcgcgatcttggctcactgcaagctccacctcccaggttcatgccattctcctgcctcagcctcccgagtagctgggactacaggcgcccaccaccacgcccagctaatttttttgtatttttagtagagacggggtttcaccgtgttagccatgttgctctcgatctcctgacctcgtgatccgcccgcctcggcctcccaaagtgatgggattacaggcgtgagccactgcgcccggtcaattattattattttttagagacagtgtatcagctctgtcacccagactggagtgcagtggtgcaatcatggctcactgcagcctcgacctcctgagcaatgctcccacctcagcctcctgagtagctgggctacaggtgcacacaaccacgcccagctaattttatttttaagagatgaggtctctacaaaaagtgttgggatgacaggtgtgagccactgtgccagcttattctttaatcttttaatttattattattattttttgagacagagtcttgctctaccacccaggctagagtgcaatggtgcgatctcagctcactgcaacctctgcctcccgggttcaagcgattctcctgcctcagcctcctgagtagctgggactacaggcacgtgccaccacacccaggtaattttttgtatttatagtagagatggggtttcaccatgttagccaggatggtctcgatctcctgacctcttgatccacccgcctcggcctcccaaagtgctgggattacaggcatgagccactgcacctggcctattctttaatctttttaaatgtctccaccaagcaaacaccttgagaagtccttatcagttattaaaaatctacaatgcaaacatacaaataaaaggagaacagtaagttctcttaaacattctgatactacttctaaacttagccaataaactgagaatgaatgttaattttttaaataaacaggccaggggcagtggttcacacctgtaatcccagcactttgaggggctgagttgggaggattgcttgaactcaggagttcaagagcagcctggacaaggtgacaaatccctctctctacaaaaaatacaaaaattagctgggtgtggtggtgtgtgcctgtagtctcaatccccaggaggccaaggggtgtgggaggatcccctgagcccagaaggtcgagtctgcagtgagccgtgatcgcatcactggtctccagcctgggtgactctgttttagaaaaagaaaaaagaaagaaaaaaaaagctttcattaactgaagacagactgaaagcaagagaaactgaaagcaagataaatgagtgggtggttttctcaagcactggtaagtgctgcagagaaaactacagcaacaggagagtcaatgatgggggcagggtggtgcatttcagataatttcagataaattatctttttctttttttttttttttttttgagacagagtctcactctgtcacccaggctagagtacagtggcacgatcttggctcactgcaacctccgcctcccaggttcaagcaattctcctgcctcgacctcctgagtagctgggaccacaggtttgtgccaccacgcccagctaatttctgtatttttagtagagatggggtttcaccatgttggccaggctggtctcgaactcctggcctcaagtgatccacccggcttggcttcccaaagtgctgggattacaggcgtgagccaccacgcccagactcatttcagataaattaaaggaacttgaacacaatgggtgacctcagtatctgactaaggaagacccttccaggcagggagaacagaaagtgccaagaccctgaggccagagtgtatctgagacagtcaagcaatgcggaggaggtcagaggagcaagaaacagggaaagcaggattggcaggaggaaggaagggaagggattgggtagagacagcagcggagaacaggacctggatgtattggcaacaggaggaactcactcgtggggttgttgacatctgagattgacactggtgttgggaaaataggaaagggtggaggtggagggagattctgagtcacagcctgatctagctccacagaaaatcagcagaagagagttctcctgggtgaatggagagagaagagcttattcagcaccctggaggagaccagagagagatagccaagaacgcacaggttttattacatgctctgtgcaagatcaggtttatttttttcattgtgctctctctctctctctctctctctgagacaagagtctagctgtgttgcccaggctgaaggtcagtggtgcattcgtagcttattgcagcctcaaactcccaggctcaagcgatcctccacctcagcttcctgagtagatggaaccacaggtgtgcaccaccatgcctggctaattttttttttttttttttttttttttgtagcaatgtggtctcgccacgatgcccaggctgttcctgaactcccgggctcaagcgatcctcccacattggctgggtttacaggcctgagccaccatgcttggccagctttttcaatttaaaaaatatagaaagtgttaatacaaattaaaaagttataaaatagtgccaatagtatcccatttttccgaagacaaacataggcagagaaaaattaatggatactgtctctctgggcaggggtattactggctattataatctttttcttcgtgcattccagaatttaccaacttttctacaaagatcatgtagcacaataagataataaacataattttgtgtgatctcaaaatacaggaagcatagaagcttccaaaacacgcctgtacccaccacgtgaagaaacagatgttaacatttggtcataattgcttcagatttctttctttttttttttttctgttttttttttgggggggacagagtcttgctctgtcgcccaggctggaatgtagtggcatgatattggctcagtgcaacctcctcctcctgggttggagtgcagtggcatgatctcagttcactgcaacctctgcctcctgggttcaagagagcacctccagctaatttttgtctttttagtagagacaaggttttgccatgttgcccaggctggtctggaacacctgacctcaagtgatccgctcacctcggcctcccaaagtgccaggattacaggtgtgagacaccacaccggctaaataataagtttttaaaaaaacaggagactggccaggcatggtgactcacgcctgtaatcgcagaactttgggaggctgaggtgggcagatcacctgagatcgggcattggagaccagcctggccaacatggagaaaccccgtctctactaaaaatacaaaattagccgggcgtggtggtgcgtgcctgtaatcacagctactagggaggctgaggcaggagaatcgcttgtacccgggaggcggaggttgcgtgagccaagattgcgccactgcactccagcctgggcaaccagaataaaactgtctcaaaaaaaaaaaaaacaaaaacaggccgggcgcggtggctcacgcctgtaatcccagcactttggaaggccaaggtgggtggatcacgaggtcaggagatcgaaaccatcctggctaacacggtgaaaccccgtctctactaaaaaatacaaaaaattagccgggcgcggtggcggcgcccgtagtcccagctactcgggggtgctgaggcaggagaatggcgagaacccgggaggcagagcttgcagtgagccgagatcgcgccactgcagtccggcctgggtgaaagagcgagactctgtctcaaaaaaaaaaaaaccaaacaaacaaacaaacaaaaaaacaaaacaacaggagaagatgatgacagacctcacaagagcttggccccagggctgaaaccccacccagtgctgtggttctgcggctgtgggcccatgggtgcccccaaagggtcccaggcagatggaggctcctggttggcgtggaggaaggaaaaggatgaaatcggctcccctggccaccccttctagcccagctgcagctgcagtccgtgggtctgagccgacccttggggttcatcggcccattttacagatgcggagcctacagccgggaggcgtggcggctctgggcggtgcagggttccggggcggggaggccgaggcgcccgccctccccgccggggctcacctgggtcagccctgagccctcgagcagggcggatcggccgctgcctgcttaaagctggggccgccaggagtgcgatcgcctgcggatctgcagctgggcaccggccgcaacgcccgccccgcgacggcaggtgagatgcgggcggccccgtgggaggggtctctgcctgtcctcgtcacccacttccttcccgtttgttgctgctgcagggctgggaatgggggggaccaagcacttcgcagggtgacccggggagatctgtgagccagtggcctcagcgttgaatgagagctctctcccgggtccgcgctcgcagggactgaagggactcctgaatgtccgcgggacgtgtcgcggcggcgcccagcacggaggaggcaggcagggaggtgaggagcaggtcagaccggccgcaggtgcagggcctcctgccctcccaggctgcggtcccgtggagggcctgcagacagctgctgagactatgagggtcagaggtctgtggtcacgcgcgctatcaccagctagctgcctcctgcctggttcctcctgcaggaatgggagtctggggggaggggagggtgtgggcaggacttcctggaaaagggaagcccgttggtgtttatgtgtgggrtggagagagggcagggggaggacggggacacacgcggagtcccccacccagatgttgtcaaacacagctcccacaccagacacgcaacccatcctagagatgcaacccaggcacacacacatggacacacacaaaactccatccatagggattcccacccagtgccacgtgagaacacaggcgtgcatcgcagacaagccacacaggcctcgcaggctcagcatacatgtctgcagcaacaccatcaggtacagagccgaggcccaggtaggcatgctcagctgcacgcaggaagcaagacacacccagacacacacaggtaagcccttactcagagaaagaaggtgcaggagatgtgtcttgggtaatcacagccacagcctctcaagtgtgcacacacacacacactcayactgagatacacagacacacagagatacctggacgtgtcaagcctacagcacaaacaggcccctgcaggtccacccggaggctgtgtgggccgaggctgctgcacacgtgtgcccagatcctcccacccccaccccaatcccgtgtcctgctccagggaagtccagggctcacatgacccaaggggagggctcccgggacagccctmggagaaactgcatcatcctcactaatgatccactycctcctcagggaataaaggctcagggaccggcagttctactctagagcccaccagcctctcagagcctccggtgactggcctgtgtctccccctgggtgagtgctgggcaggctaggtggaaggagggtgaaatgggcctgcagggccatcttggtacagctcgccctctcacagaccgcgccccccttccctaagccagcttgtgcagccttgtgcagcttgtgtgtcctgagaattagggcaccaaggggttcccgcaggggcagcctgcagcaagcagtctccctctatctcagggcaggygggggtctcaaggcctccctgcccttgtcacagcccgggccacctatgcttgtctctcttctcccagatggacatgtggacggcgctgctcatcctgcaagccttgttgctaccctccctggctgatggtgccacccctgccctgcgctttgtagccgtgggtgactggggaggggtccccaatgccccattccacacggcccgggaaatggccaatgccaaggagatcgctcggactgtgcagatcctgggtgcagacttcatcctgtctctaggggacaatttttacttyactggtgtgcaagacatcaatgacaagaggttccaggtctgtgcccaacagagtggggcaggaggtgggggcgggcagtggggagaagccgccttacctagtgaccttcctttggtgagggcagagggaaggtgatggggcacctttgggcgccgggagcattcagtgtctcccttatcctgacttggtgggaggatcggcatagccactgaccccagggaagaggcctgccctatctgtttgctacaggagacctttgaggaygtattctctgaccgctcccttcgcaaagtgccctggtacgtgctagccggaaaccatgaccaccttggcaatgtctctgcccagattgcatactctaagatctccaagcgctggtgagccaccctcagccctgccttccgagatcctcacatagcagggacacaggggccctgtggcttgakctgaccctgggacttctgcgcccaagatgtgcacccacgacctctatcccctccacaggaacttccccagccctttctaccgcctgcacttcaagatcccacagaccaatrtgtctgtggccatttttatgctggacacagtgacactatgtggcaactcagatgacttcctcagccagcagcctgagaggccccgagacgtgaagctggcccgcacacagctgtcctggctcaagaaacagctggcggcggccagggaggactacrtgctggtggctggccactaccccgtgtggtccatagccgagcacgggcctacccactgcctgrtcaagcagctacggccactgctggccacatacggggtcactgcctacctgtgcggccacgatcacaatctgcaggtgagggccctgtgggtggggtgggagctgggtgaggggggtccccatcccagctgatgtccacatggctggggtcctcctgctgtttgagggtctcctgtggccttcagaatgtctagactgtccctcaaatcttgctgtctaaccaggaaaacactccaaagccagaataatatcttcgaattgccaatttctttctttctttcttttttaagctyttttttttttttttttttggagacaaggtttcattgtttttcacccaggctggagtgcagtggtgcaatcggggcttactgcagcttcaatctcccgggctcaggtgaacctcccacttcagcctccagagtagctgacactacaggcatgggccaccacatgcagctaatttttgcttttttttttttttttgagagggagtgcagtggcacgatctcaactcactgcaacctccgcctcctgggttcaagcaattctcctgtctcagcctcccaagtagctgggattacaagcatgggccaccaaaccttgctaatttttatattttagtagagacggggtttcaccatgttggccaggctgatctcgaacttctgacctcaagtgatctgcccgcctcggcctcccaaagtgctgggattataggcatgagccactgcacctggcccttgcgcattttttttgtagaggcaaggtctcactatgttgcccaggctggtctcaaattcctgggctcaagcaatccaccccctcagcctcccaaagtgctgggattacaggcatgagccaccacacctggccaccaatttcttactaagtgctctacctatgaaataggattaatacactcctaaaagtcaggaaattgaagccaggaggggttacatacctcaaggtgactctgtggttagggccagatcgagccctggaccttaggcagggctctgctcaaagctgggtctccactgaccccttgtcctccatcctcagtacctgcaagatgagaatggcgtgggctacgtgctgagtggggctgggaatttcatggacccctcaaagcggcaccagcgcaaggtccccaacggctatctgcgcttccactatgggactgaagmctcactgggtggctttgcctatgtggagatcagctccaaagagatgactgtcacttacatcgaggcctcgggcaagtccctctttaagaccaggctgccgaggcgagccaggccctgaactcccatgactgcccagctctgaggcccgatctccactgttgggtgggtgggccctgccgggaccctgctcacaggcaggcttttcctccaacctgtggcgctgcagcagggcaggaaggggaaacacagctgatgaactgtggtgccacatgacccttgtggcacagatgcccacgtatgtgaaacacacatggacatgtgtcccagccacagtgttatgctctgtggctggctcacctttgctgagttccggggtgcaatgggggagggagggagggaaagcttcctcctaaatcaagcatctttctgttactgatgttcaataaaagaatagttgccaaggctgaaccagtgccactggtgtgttatgttctcctggttagagtggctgggctcccctgagctgctgttccttgcctccatctcttaccccatccatgaccaagttgccttatccatggatgtgattataaaacccggccaggcacggtggctcacacctgtaatcccagcactttgggaggccgaggtgggcggatcacgaggtcaggagatcgagaccatcctgactaacatggtgaaaccccgtctctactaaaactacaaaaaaattagccaggcgtggcggcgggtgcctgtagtcccagctactcgggaggctgaggcaggagaatagtgtgaacccaggaggcggagcttgcagtgagccaagatagcgccactgcactcctgcctgggtgaaagagcgagactccatctcaaaaaaataaaaaataaaaaaaaaataaaatccaagcagaggccaggctcagtggttcacatctgtaatcccagcactttgggaggccaaagcgggtggattatttgaggtcaggagttcaagatcagcctggccagcatagtgaaaccccatgtccactaaaaatacaaaaagttagtcaggcttgctggcgagtgcctgtaatcccagctacttgggagtctgaggcaggagaatcacttgcatctgggaggtggaggctgcagtgagtcaagattgcgccactgcactccagcctgggcaacaagagttaaactctgcctgaaaaaaaaaaattggccagttgtggtggcaggagcctatggtcctagctactcaggaggctgaggcaggagaattgcttgaacccaggaggcggaggttgcaatgagctgagattgtgccactgtactccagcctgggtgacagagcaagaatctgtctcaaaaaaaataagtaaataaaataggccaggcacgatggctcacgcctgtaatgccagcactttgcaaggcctaggtggtcggatcacttgaggtcagaagttcaagaccagcctggccatcatggtgaaaccccatctctactaaaaatacaaaacttatctaggcgtggtgacacatgactgtaatcccagctacttgggaggctgaggcgagagaatcacttgagcctagggggtttgcgggtaaagggggtggagaggtgagggcggagattgcagtgagctgagattgtgccactgcactccagcctgggtgatagagcaagactctgtctcaaaaaaaaaattaattcaataaaatccaagcagaaagaagggtacaacataaagcaagtcttcctccaccccaggggcaactaatattaatcattttctttctctatatagtctatgcctccataatcaaaacattccctttattattttctttttttttttttcttttttttttttttgagatggagtctcactctgtcaccaggctggagtgcagtggcgtgagctcggctcgctgaaacctccaactcccagattcaagcaattctcctggctcagcctcctgagtagctgggattataggcacgcgccaccacgcccagctaatttttttttttttttttttttttttgagatggagtcttgctctgtcgcccaggctggagtgcagcggcgtgatctcggctcactgcaagctctgcctcccgggttcacaccattctcctgcctcagcctcccaagtagctgggattacaggcgtctgccaccacacccggctcgttttttgtatttttaaatagagatggggtttcatcgtgttagccaggatggtctcaatctcctgacctcgtgatccgcctgcctcagcctcccaaagtgctgggattacaggagtgagccaccgcgcctggcaatttttgtatttttagtagagatggggtttcaccatgttggccaggatggtcccaatctcctgacctcatgacctgcccgcctcagcctcccaaagtgttgggattacaggcgtgagccgccgtgcccggcctattatttctttagggagaggggtcttgctatattgtccaggctggagtgcagtggtgcaatcatagctccctgcagcctcaaactcctgggctcaagaaatcctcccaccctagcctctcaagtagctaggactacaggcacgcaccaccactcctaactaatttttagattttttttttttgtagagatgggagtcttgttctgttgcccaaaccggtcttgtactcctgggctcaagcaatcctcctgcctcagcctccgaaagtgttgggattacaggcatgagctattgcttccagactgtttttcagagacagagttttgctatgttgcccaggctggtcttgagctcctgggctcaagtgatccatctcagcctcccgagtagatgagattacaggggcatgccactgcaaacacattcccattttttacaccaaaagcaacacaatatacacatagttctgcacacattcccgttactgcactccactttttttttttcttttttgagatggagtctcactctgtcacccaggctggagtacatgggtgtaatgttggctcactgcaacctccatctcctgggttcaaccgattaagcaattctcctgcctcagcctcccaggtagctgggattacaggcccccaccaccatgcctggctaattttgtatttttagtagagacggcatttcaccatgttggtcaggctggtcttgaactcctgacctcaggtgattcacctgccttggcctcccaaagtgctgggattacaggcatgagccactgtgcccagtcctgaattgtttcttgcataagatccaagaatgctctcttggggtctggatcgagacccctttcctgtaacacttcgaacaattttgcaatcctcaatgtcataacaaatgaccttgtctacgcattacctatggggcagacatgtttgcaggattcccaggaacaaggaaaaagatcgcccttctttttgacagccacgaagcttctgccttatgtcactggctccttgctagtgccccttgcaggattttattggttttgggggttgttttgagagacagaatcttgctctgtcactcagactagagtgcaatggcaggatcatagctcactgcagcctcaaattcacagggtcaggtgatcctcctgcctcaacctcccaaagtgctgggattgcaggcgtgagccaaagtgccaaagtgctcggcctcattgaggttttttttttgagatggagtctcactccatcagccaggctggagtgcagtggcacgatcttggctcactgcaacctccgcctcccgggttcaagcaattctctgcctcagcctcccaagtagctgggactacaagcacacgccaccatgcccagctaatttttgtatttctagtagagatggggtttcgccatctttgccaagctggtcttgaactcctgacctcatgatccacccacctcggcctctcaaagtgctgggattacaggcgtgagccaccgcacccagccgtggtctttttaaatctttccttctaggccaggcatggtggctcacacctgtaatcccaacactttcagaggccgaggcaggtggatcacctgaggtcaggagtttgagaccagcctgaccaatatagtgaaaccccgtctctactaaaaatacaaaaattagctgggcatggtggcgtgtgcttgtagtcccagctacttgggaggctgaggcagagaattgcttgaacccgggaggcggaggttgcagtgagccgatatgacgccactgcactccagactgagcaacagagcgagactctttctcaaaatacataaataaataaataattgtttccctcttaccaacaaggctgcagtggtggtccctggaccaatgctgtgaaagtaatgtgtaagaaaacttctagaaggagaattatctcagggctgggcacagtggctcacacctgtaatcccagcactttgagaggctgaggcaggcagatcacttgaggtcaggagttggagaccagcctggccaacatggtgaaaccccatccctactaaaaatacaaaaaattagctgggtatggtggcacgtgcctgtaatcccagctactgaggctgatgcaggagaatcgcttgaacccaggaggcagaggttgcagtgagccgagatcacaccactgcaatccagcctgggaaacagaatgagactccgtttcaggggaaaaaaaaaaaaaaaaaaatctcagggcctgtttttcttatactgaaagcagagtgctagacctgatgtgacagttgcaggggagcccagttcccctctgagggagagttaagtaacacccacccccaggcaacccaggccattagcgctaggcaaggcacaggaacccctcctttggcccaccctcaaccgccacttgcaactgctacacggcagggacccagttgtttggctccagctgcctgcctagcggagtgaaatgaatctggacaaaatgtaaacagggctgagtgcagtggctcatgcctgtaatcccagcactttggtaggtaggggcaggcagatcacttgaggacaggagttcaagaccagcctggccaatatggcaaaaacccacctctactaaaaaatacaaaagaatgagtcaggcctggtgatgcatgcctataatcccagctatttgggaggctgaggcatgagaatcgttcttgtctgggaagtggaggctgcagtgagctgtgatcacgccactgcactccagtttgggagactatctcaaaaaaaaaaaaaagtaactgaggttacttctggggagaggcacttggtgaaattgtcacctttcatttgttattttacttatttttttttttttgagaagaagtttccctcttgctgtccaggctggagtgcagtgacgtgatctcggctcacagcaacctctgcctcccagattcaagcgattctcctgcctcagcctcctgagtagctgggattacaggcatgcgccaccacgcctggttaattttgtattttttagtagagacagggtttctccatgttggtcaggctgatcttgaattcccgacctcaggtgatccacccgcctaggcctcccaaagtgctgagattacaggcatgagctactgctccggcttatttgttactttgcgcgcgcgygtgtgtgtgtgtgtgtgtgtgtgtgtgtgtgtgtgtgtatcttggtataatttgctactttatagatgtcaatactgttgaatttgttacaaggtgtatgtgttactgttacaattttttggttttttttgaaacagtgtctcactctgttgcccaggctggagtgcaatggtgtaatcatagctcactgcagtttccacctcctgagctcaagggatcctcctgcctctgcctcctgagtggctgggaccacagcttcaccccaccactcttggttaattttgtgtgtgtgtgttttgtagagatggggtcttgctatgttgcctaggctggtctcaaactcctgacctcaagtgattcttcctccttagcctcccaaaatgcaggattacaggtgtgagccatcatgtctggccaactgttataattaagcagtgatctttccaaaatgcaatcctggccaggggtggtggctcacacctgtaatcccaacactttgggaggctgaggcgggcagatcacttgagatcaggagttcgagaccagcctgatcaacatggcaaaacgctgtctccattaaaaatacaaaaattagctggcattgtggcgggcgcctgtaattccagctactcaggaggctgagacaggagaatcacttgaacccaggaggtggaggttgcagtgggccgaggtcgtaccactgcactccagcctgggcaacagagcaagactctgtctcaagcaaacaaacaaatccccaaaatgtaatcctgagtttgttccagctgccatttaccgtcacttctga

SEQ ID NO: 95467 - DNA, 63462 bp, Homo sapiens
gagcctgggaggttgagtctgcagtgagctatgattgcatcactgcactccagcctgggtgacagagcaagactttgtctcaaacaaacaaaaaatttccgtatgaaaagcattcacatgtcaaaatatacaataaagttttcttactaagccatgcctcttcatccattggtattcctttctgcagacatacaggtaaccactgttagcagctgcacgtggcaaatacacgcagaagtggatctgtaccttcacccaccacccccgccaatttttttttgagacagggtcttgctctgtctcccacgctggagtgcaggggcaccatcatagctcactgcagccttgatcacctgggctcaaaagatcctccagcctcagcctcccgagtagctgggaccacagacttccaccaccatgcccagctagtttatttttatatatatatttatttatttatttttcttcctttttatttttaaattttattttattaattttttgagatggagttttgctctttcgcccaggctggagtaaagggatgtcatgatcttggctcactgcaacctccccccctgggttcaagtgattctcctgcctcagcctcccaagtagctgggattataggtgcctgccaccatgcctggctaatttttttttttttttgagacggactctcgctctgtcaccaggctggagtgcagtggtgccatcttggctcactgcaacctcaacctcccaggttcaagcgattctcctgccgagtagctgggattacaggcgagcgccagcatgcccagctaattttttttttttttttttttgtatttttagtagaagcggagtttctccatgtttgtcaggctagtctcgaactcctgacctcaaatgatccacctgcctcagcctcccaaagtgctgggattacaggcgtgagccaccaggcccggccttttttttaagatacagtttcactttgttgcctagtctggagtgcagtggtacgatcttggcttgctgcacccaggttcaagcaattctcatgtctcagcttcccgagtagcttggattacaggcacatgccaccgcggctggctaaagtttttttttttggagacggagtttcgcaattatcgtccaggctggagtgcagtggtgccatctgcagcctccacttctggggttgaagcgattctcccacctcagcctcccaagtagctgggactgtaggtgcctgataccacacctagctaatgtttgtatttttagtagatacagggtttcaccatgttggcctggctcgtcttgaactcctgacctcaggtgatccacccacctcaacctcccaaagtgttgggattataagcatgagccactgcacccagcctaatttttgtataatttttgtatatttttagtagagacaaggtttcaccaagttggccaggctggtctcagactcctgacctcaagtgatctgcccgcctcggcctcccaaagtgctggggttacaggcatgagccaccgtgcccggcccagaaatttctcatcctcccaaacttgtctccgtgcaacacccactccccgttgtccctcccccagcccctggcacccaccattctcctgtctctgtggatttgcctcttctggacatctcatggatatgagatcacatgatatttttccttttgtgactggcctgtttcgctgagcttgatgtcctcaaggttcattcatgccatacgtagcctgtgtcagaatgtccttcatggcaggcacggtagcacatgcctataatgccagcactttgggaggccaaggcgggcagatcacctgaggttgggaattcgagactagcctgaccaacacggagaaaccccatctctactaaaactacaaaaaaaaaaaaaaaaaattagccgggcatggtggcacatgcctgtaataccagctactcgggaggcttaggcaggagaatcacttgaacccaggaggcggagttgctgtgagctgagatcacgccattgcattccagcctgggcaacaagagcgaaactccatctcagaaaaaaaaaaggaagaacattctttttttttttttttttttttttttttttgagacagtgtctcactctgtcgcccagactgcagtgcagtggtgtgatctcggctcactgccacctctgcctcccagcctccagcgattctcctgcctcagcttcccaagtagctgggattacaggcgcctgccaccatgcccggctaatttttgtagttttagtagagatggggtttcaccatgttggccaggctggtcttgaactcctgacctcaggtgatccgcccgcctcgacctcccaaagtgctgggattacaggtgtgagccaccgtgcccagcctgttcttcctttttaaggctgaatcatattgtgttgtatggatacaccaagttttgttgatccattcaattgttgatggacacttgggttgtttccaccttttggctgttgtgcagaaccgtgccatgaccatgggtatgcaaatttcttttggagtctctgctttcacttctagtttccttttgaagccttatactgctttgtcgttggctgaaatggtaaggcagcagctgacctgtctctagctttccccattaccttgctgagtgtctgatatgcaactttgtaacaccctttcaggtgggatcgattattttctttttacgaacaaggacactgaggctgataatgggcctagggtcacccagcttgggagggacaggactgtgggtggaacccccagcctgctgtcaactgagtggctttagttctagcaaattcatctctctttaactaggatcagggtcaggagcctccaaggcagaggaggaggtagacttttgaggaatgttttgcccatgggcaaatgggaggggaggaggagataatactatttattttttatttatttatttttttgagaccaagtctcactttgttccccaggctggagaggagtggcaggatctcagctcactgcaaccttcacctcctgggttcaggtgattctcctgcctcagcctcccgagtagctgggattacaggcgtgcaccaccacacctaatttttgtatttttctgagagggtttcaccatgttggccaggctggtctcgaactcctgacctgaggtgatccacccacctcggtctcccaaagtgctgggattacaggcgtgagccactgggcccaacagaggagataatatgaatggttgtgttcacttagcaaagaagagcttacgatgtgccatttgctttatcagttttactcttttaagcctcatagcagccctaggaagtggtgggtactagcattctgcccgttttgcagaaggggaaactgaggtatagaggggtgaagccacacaactgaggttacactgctataaagtgaaggaactggtgtttgaatccatgctctctggtccccagtttagcagagaggaaggcaggagaagggaagaccaggacaggtgggtgtgggtgggggcgggatgagaggagacctgctgggctggcagagtctcaggctcagaacatggagaaaccctagatcctgaaaccccaaatcacccacttctgtgtttcttcttacatggacaaagaaaacgatgccagaagaagacccggccaccttggatgatcactcaggcaccactgccacccccagcaactccaggacccggaagaggcccacttccacgtcctcctcgcctgagacccccgaattcagcactttccgggcctgccagtgaggctgaggactgggggacccctctgtctccaggcattcgggggcctgaggtccctccagctacttctgggggggctctgtcagccactttctcagggaattggacagaggaaaggaaggggaaccctggccttgggattttcatcacagaggagtgggagaggggacacaggcatgggcctggcactatacagacaacaggaagttcccctctcgaccttcggctcctcaggaccaccagagaaggagatgtcaggaccccttcttgtcccccagctgggccataagacgtcccaggtctctgcacaccygtggaattcctcccttccccagtgggtttttgagcatagggtgcccttgggtgtgttgtgtgtctgcctgctggcttgcttaagttattaattataacacgggtcaaggtgttcccaggcctctatggagtggaatccttcaagctggggacctctggatcccatggttggatggctggggggtggagcgtgtctgaattcaccaaatttgaagcatctctcaagggcagtcagggtggtgtatgcggagcctcctgggggtgtggggagtgcagcagtgccatgccagggtctctgcaacggtacttgcattagagggtttaggaggtggaatgacaggggctacgggtgagggacatgaaggagaatgagggcccctcgcagtggctcacacctataatcccagcactttgggaggccgaggcagggggttgcttgagcccaggaggttgaggctgcagtaagctatgatggcaccactgcactctagcctgggcaacacagtgagaccctgtctcaaaaaacaaaaggggccgggcgcggtggctcatgcctgtaggcccagcactttgggatgccgaggcgggcggatcacctgaagtcaggagttcaagaccagcctgaccaacatggtgaaacctcgtctctactaaaaataaaaaattagctgggcgtggtagagcatgcctgtagtcccagctactcgggaggctgaggcaggagaatcacttgaacccgggaggcggaggttgcggtgagctgagatcgagccattgcactccagcctgggagacagagcgagactccgtctcaaagaaaaaaaaaaaaaaaaaaaaggaatgaggcgtaaatgaggtctagggaagagttaaagctggagtgctaggaagtggcccaagctcactgggtcgcccaaaagagatggggccacccaaaatgaagggggatgcagagagaagacgggtttgtgtggcgggagaggggccctgcgccgggccgggctggactcagcatcgttggaggaggggctgagagaggagggggtcaaaggatatcttgtgcgaaaggagacagtcaaacattaaggattaagaaggcaatgtgggcagagatgatggggaagggaggaggagcggtcgaatgtcggggaggggtcctttcaaccgggctcaggttgctcctggaggccagggctcatcggaaatcgtcggtgcgggggcggtggggggaagggttgggggcgaggcccgggcgctggccacgccctttcccccgcccattccccagagcggggcggctgacaaagcgagtccgggtgggagggcgcgggcaggcacgggggcggggcctcgtcgcggctgggccacgcctccctgagggctgcctcacaaagccgggcgggcccgggggggtggggcccagtctcaggggcgtgtccaggtcggggcagggaagccgcatcacgacgcgcggctgcttgtgtggggcggggtacagggcgtgtccacgcggccgagcaccgcccccgccgtccccgcaccgcctcactcgaaagcagccgttaatgaggcgccggcctgggggcggggcccaggcctccgaggggcgtgcccgcgcgcccgagcaccgcccccgacgtaccctcccgccccgcagttcccgggcggtggagccacctcacaaagcggcgaccgttctcgcggggcggggcgtagccggtcccgccccacggggtgccctctcgttcgctcgctagctccccgcgcccaggacggccggcagagggcgctgcgccacggggccgggccgcggcgacggtggcggcggcggcggcgaggcggcgcgtggccggcaggcggcgctgcccggctcggcctcggcctgcacggcggctgcggcggcggtagcggcagcggcggcggcggcggcggcggcggcggcggcggcggcggcggcggcggcagcggcggcggcctgggcccgggcgcagcggcggcggcggcggggcctggagccggatctaagatggcagcggcggcggcggcggtggggccgggcgcgggcggcgcggggtcggcggtcccgggcggcgcggggccctgcgctaccgtgtcggtgttccccggcgcccgcctcctcaccatcggcgacgcgaacggcgagatccagcggcacgcggagcagcaggcgctgcgcctcgaggtgcgcgccggcccggactcggcgggcatcgccctctacagccgtgagtacggggccccggggcaggcgcagggccggggctgctcacgaggccggcccggggcgggggccggcggggaggggccctgagcgcgggggcctggcgtggggtccccgggactgagccggtggcctgcagggagcgaccgtggagggccggtgccaggggacagacagagaaaagagggcgtgcgtggtggccggaggggcaaggtgcccagagtgagcaagggagcgcgaaatggggagtgaagggcctgagatttgggaggggtgggtgagcaggaagtggggggctctgagtggaaggggaatttggaggacgccaggcgtggtgggcttaagcgtgggggagggaggtccggggtgcgggagaggtgggcgtctcgggggcgggcgtggccgcctctgcagggaggagggtggggcgtgggcggcccgggatccctctggggaccccctggatagctcaggacggttggaaagtgtttgctggtctggggcgcccgcgagtaccgagttccaccgctgtgcgaggtgtggcgttcaggacccccgaatgggaaacttcaggatctggggagagggcccatgcggggacggtgggagccgcagggtgagctcctcgtggaaacgtggacgggacgggccccttcctgatgccgggcttcgaagtaagagctaacagcctcctcccatcttcttttgggggatgtgagaagctggttacattttccgaagctgctttcaaaactgacatttcactggggggaaaagaaaatcacaaatgcgtttgccagcaccccccacccccgctcccagtctttgtagttcattcttcttcttgttactccttcttatctcttctctttgattccttgttcacattttgctactctgtgtcatttggctttgtctttcagggcttcttgcactgatgccctggggaacccctcaggaggcctctagctagcttgggtcctgtgtgaattttttgccactttggaaacggcccgattaaaggaaagcccgaggagcagtccgttcacactgggttttccctgcacctcgactttgaaaacgtggactaaaggagttgtgtctgctgtccgagggtgccgtctctttttgctggtgcagagcctgggtcttcttggaccagatgagaggggaaggagggtatttcagcgggggtttcagagttcaaggcagacactcagctcaacagaaccccagatcataagcaaaacctattcactgggcaagcattggtagccaactttgtcctgaacagaacaaagcggggcagcgtttccaaaactagggtcccagggcttatcctcaaaggagttccaggagagttggctatcatttttaagtaaacctttaaaaaatttttttaggaccaggcggggtagctcagcactttgggaggctaagcactttgggaggatcacttgaggtcaggagttcgagaccagcctggccaacatggtgaaaccccgtctctactaaaaatacaaaacagcggggtgtggtgacatgtgcctgtcccagctactcgggaggcagaggcaggagaatcacttgaacctgggaggcagaggttgcaatgagctgagatcgtgccattgcactccagccggggagacagagtgagactccatctcaaaaaaaaaattttttttagaacaattttagtttagtttttttttttttttttttttttttttttttttgagacagagtcttgctcggtcccccaggctgaagtgcagtggctcaatctcggctcactgcaagctctgccacctgggttcacgccattctcctgcctcagcctcccgagtagctgggactacaggcgcctgccgccatgcccggctaattttttgtgtttttagtagagacggggtttcaccatgttagccaggatggtcttgatctcctgacctcgtgatccacccgccttggcctcccaaagtgctgggattacaggcatgagccaccccgcccggccagaacaattttagtcttatagatgtattggcaacatagtgagatgttcctaccatcttattcctggagtaacattttgtgtttgtatttgtgtttttgtttttgttttgttgatactcttgaaagtattacttgttattaagacagcacttctctttgagaggtaattggtaactgaaacattttttattattagagacaaggtttcactatgtcactgtgttgcccaggctggtctccaacttctgagctcaagtgatcttcctgcctcccagaatgctgggattacaggtgtgagccaccccacctgaccggaaacattcataaaaaggagaaagtccacattcctcagagagcctcagtcccagattcccagatgatatatccttagggttctgaaataatttttttttacacttttttgttttttttctttcttttttattttttttatttttattttttattttttcagacagggcctcactctgttgctcagactggagtgcagtggtacagtctcagtctcagctcactgcagccttccatggctaaagtgatcctcatacctcagcctccctagtagctgggaccacaggcatgtgccacacccagctaatctttcatattttttgtagagaaagggttttcactgtgttggccaggctggtctcaaactcctgggctcaagtgatcctccctccttggcctcccacagtcctggaattacaggcatgagccaccgcaccgccctctttatccttaagtaacattgatatggagataaaaaacatgggttcttggccaggcgtggtggctcacacctgtaatcccagcactttgagaggttgaggcaggcgaatcacttgaggtcaagaggttgagaccagcttggccaacatggcaaaatctcgtctctgctaaaaatgcaaaaattagccaggtgtggtggtacctgcgactgtagtcccagctactccggaggatgaggtgggaggatcgcttgaaccagggaagcagaggttacagtgagctgagattgcaccactgcatgtcagcctgggtgacagagcaagaccctgtctgaaaaaaaaaaaaaaagcatgggttctggagttggaggtgatcagtgctgggtgtattaatttcccatggctgcaataacaaattatgacagatttttggtttaagacaacaggaatggattctctctcagttcatggtcagaagtctgaaatcatggtactggcagggccacaatccctggagaggttctacaggaaaatccttgcatcttccagattgcagtggatccagctgttgcttgatttgcagcagcgaaacccaagtccctgcgtctgtcttcactcctgtgtcttgtgtcctcttttttccttttttttttaaagtgagatggagtctcgccgtgttataggctggtctcgaactcctaggctcaagtgatcctcccacctcagctgttcttttcttttctttttttttttgagacggagtctggctctgtcacccaggctgaagtgcaattgcgcgatctccgcttactgcaagctctgcctcctgggttcaggccattctcctgcctcagcctcccgggtagctgggactacaggcgcccgccaccacgcccggctaattctttgtatttttagtagagacggggtttcaccgtgttagccaggatggtctccatctcctgacctcgtgatctgcccaccttggcctcccaaagtgctgggattacaggcttgagccaccgtgcccggccccagctgttcttttcttataaggacactgggcattggatttagggcccactttatatctaggatgatctcatctcaagatccttatctgcaaagaccctatttcctaataaggtcaccttcacagattccaggggttacaacttggatgtctgtcttttttttttttttgagatggaattttgcccaggctggagtgcaatggcgtgatctcggctcactgcaacctctgcctcccgggttcgagcgattcgcctgctttggcctcccaaartcctgggattacagggattagaggcatgtgccaccatgcccggttaattttttttgtatttttagtagagatggggtttctccgtgttggtcaggctggtctcgaactcctgacctcaggtgatccgcccaccttggcctcctaaagtgctgggattacaggtgtgagccaccgccamcagcctcacatatggctaatttttaagtttcttctagcgatgcggtctcactattttgcycaggctggtcttgaactcctgggctcaagcagtcctcctgccttggcctcccaaagtgctaggattacagacgtgagccactgcgcccggccaataaatatttrtgtccatgttactgacagcagtgttcgttggtgtggcatgggaatgagctagcttttctaggaggagccccctatgctccagggctgccccgctgtcttggctcaccggccatgggagggagtcctgggccatgatctgtacctaacataggaggcccaggagaggcacgtggggaggacttccagccctgttccttgacgtctgcaccctccaggggaaggatgacagctgcagaagggcctgtctctgtcactctgtagtgaacagttacttcttgccatctgaagtcaccctggcctacgtccatgagattggccaaatggcaactaccaacaccaggccattttccctgtgcagagggggaggccctttggcgtgggcttcctgggcttgaggaagctttggcatggcctctggagttcctgggcataggctgccctcccttggaaaggaggcagtttctcagggaggggtgccgggaaagagaacagaacaaactctcacttccccagccctgtggcgctctttctggaaatgactgtgtcacttttctttcttggtcagcacgagtcagtgtggccagtgctttagactctcccatccccttggctcagaagcttacacagcagcatgggctccgtcaggggctaaacttcagtttgtgaggggcatgccatggggtggaaagttcagagaaaaaccctttgtccaaagaaggtgaagaatggcctgctgtcaccgaaccaggggcccttgtgacttcctttggttacactcctgggatccccctgacagctggggcaggggtatagaagagcttgttatgtgccccatctttaggacatctcggtgtcaagctggagtgacaacagggaaagttagtaaccccagaaaggcatttgtgtttcagcggtgcctgcgtgtggctaatggataccgtcatttattgagcatttatcccgtaccagactgtgcataaacttgtgttgactcaaaatgcttgaccttgggggcagctagggaaagggcagtgatataaattaggcctatgggccacattgagcctgtggcctatttttatctgtgtttgtattttattagtgagacagagtctcactgtgttgcccaggctggagtgcaatggcatggtcttggctcactgtaacctccacctcccaggttcaagtgattctcatgcctcaccctcctgagtagctgggattacaggcctgtgccaccaccctggctaatttttgtatttttagtagagacagggtttcaccatcttggccaggctggcctcgaactcctgacctcaaataatctgcctgcctcagcctcccaaaatgctgggattacaggtgcgagccaccgcacccagcctgtgttttattatttatttattttgagatggaatctcgctctgttgcccaggctggaatgcagtggcgcaatctcggctcactgcaacctctgcctcccaggttcaagcgattctcctgtctcagcctcccgagtagctgggattacaggcacatgccgccatgcccagctaattttttgtattttagtagctcactgcagcctctaactcctgggctcaagtgatcctctggcctcatcctcccaagtagctgggactacaagcacatgtcaccacccttggctaatttaagcaatttttttagagacagagtcttgctgtgtttcccaggctggccccaaacccctggcctcaaaccatcctcctcctgcctgagcctcagaagtagctgggattatagtcacgaaccgctgggcccgktgtggcctatttttgtacagacaaagctaagaaaggcttttacagtttttgagagattgattagggaaaaaaactaaaacccaatccacaaacaacaataatcagttgagaccacagtgtcctgcaaaacctgaaatatttactcactggcccgaggcaggggaagcttgtagacccctgggataaatgaatgaggcaggcaggagttggggtctgtggggagtttggccccagccaaaagagaaaccaaaaaatcctcaggccgaatagagcatacttctgaattgtgtgagccccttgtgccaattgtggcgcttactgtatgttaccacttactctgaaaagagttctgtgaggtcagagataccaaccccaatttactggtggaaaaacagaaatgaaagaacttgactggccaaagtgatgtggttggcaggcagcagagatggctttggcattctgggtgactggatgcccaccttaaatgcatatataagtggttcagtgacatttatctgttcatcacaaagacccaaagtagcagaggcttaattaaacacgatggcattttattttttgtgctctaatgctaaagtgtgaagattgtcaggtgccaaagtctcctgggctcttggaagttcccagatccaggtcctccccccggctttttttttttttttgagatggtgtctcgctctgttgcccaggggctgcagtgcagtggtgtgatctcagctcactgcatcctctgcctcccgggttcaagcgattctcctgcctcagcctcccaagtatctgggactacaggcgtgtgccaccacggctggctaatttttgtatttttagtagagacggggtatcgccacgttggccaggctgttctcaaactcctgacctcaggtgatccacccgcctcggcctcccaaagtgctgggattacaggccactgccccaggctgatcctccaccattcttaaggtgaggtcttgtcctcaggtttcagcatgactgctggagtcccgccattacaccctggcttccagacagcaggacagaggaagggacaaaggagaaagggtgcaaaggtcacatccaggtgtttgttaagaaaggttcccggtagctgatgcaaggtgcttcagctttcattttgttggctagaatgtagtcacatgatcactgccagctgcaagggatgctgggaaatgtagttttcaatctgagcggccatgtgctcagctgaatttagggttccagtttccatggacaaagagagaacatacagggagtcaccttggccacagtgggtaggatctggacctggccagaatgttgggaaggacgtttctgggttatggagaggtgctccagtgggccagggctggagacagccacctggcttggagcacagggtcccctgtgaggagtggaggggctaaaagtggaaacagggctgggttggaatcgaggatttttttggtttttttggagatgaattctcgccctgtcacccaggctggagcacagtggctcaatgtcatctcactgcaacctctagcctcccaggttcaagtcattctcctgcatcagactcccaagtagctaggattataagtgcgtgcaaccacacccagataatttttgtatttttagtagatacgggggtctcacccttttggccaggctggtcttgaactcctgacctcaagtgatccatctgccttggcctcccaaagtcctaggattaccggcatgagtcaccgcacccagcctcaggtgaaatcttaatggaaggtgtccagtgctgtgagcagctcctggtcaccaagcactggccctctgtgtagggggtctggatgagatgggtgggcaaggcctttcaacagaagctggagtgtggtgtgaacttgctaatgactttgagatgccaagcctcacacacctcagaccaggttggatttagcaggtggagaggctcaggaagacctctgtggcaggtgtgtctcctttctgcggaaacctgctgcttctaaggtctgctggagaacctgggaggtggtgagtttgcaaagacatccagggaagcagccacttaagcgagggcaggatggaggggcccacctgggccacacctggctgcttgaggtggcgagttgaggctgggaggggtttccatcagttccatcagctcagagctaggatttttttttcttctttttttgagacagggtcttgctgtgtcacccaggctggagtgcagtgacacgatcatagctcattgcagccttgaacacccaggctcaagggattctccctccctcagcctctctacaggctgggaccacaggcgcacatcaccatgcctggctaatttttttttttttttttttttgtagagacagggtctcactatgttgctcaggcggatgtggaactcctgggctcaagcgattctcctaccttggcccccaaagtgctgggattacaggtgtgagtcatggcagccacggctccagagctcgggttcttaatctggtctgtggatggcccctgggggcggtcccatgagcccctcacaattggacacagttttgcaaaggggtaaaaggacaagaatcggtagctgtgactgtggatgagcctctgagcttcactttccctccctgaaagggggtgacagtggcacctccctggaggttttcgtggaggggaggaaacacatgtaaaatacttcaccccagttgggcacagaggctcatgcctgtaatcccaggttttgggaggccgaggcagcagggcggtttgagtccaggaatttacaaccagcccgggaaacacagtgaaactgtatctcttaaaaaataatttaaaaaaattagccggcatggtggcacatgcctctagtcccagctattccagaggctgaggcgggaggattgcttgagcccagaagcttgaggctacattgagccataatcgtaccactgcactccatcccgggaaacaggrcaagaccttgtctctaaaaaaaaatgcttcttgcttgatgacttgtgatatatgaaaaggaagaaagaaaagaaaagctttgccctgtgtgcctggcccgaagtaagtgctccataaattggccgtggtgtagctgtggattctctgcacatttttctgtgcagaacctcccctgatttcggtcagcttctcagaaggatctgtgactgaaaaagggtaccagttcctggaggacagcacctgattggggagtggagtctgccctggctggtaagggattgggggctctctgcgcagggccaggacatctctccagggacaggcgagaagctttgaaagggcaggaaggagagggcagcaaggtcagatgccgtgagaggtcagagtgagagccaaggggcggtcactggatttctgagcaggaggtcacaggtgacctcagagagcagtcccctggagggctggggtgggggaggggccagccagatggcaggtcttgggggaggtgacagtggagctgcagagagagcaggggggacggtgacctttcccagcccactgagacccactctttcattcattcagccagaaacaggcagcgaaagtggactcgccgtctccatagtgcggtagctcccatccagccagcttgaaatggtcagcagaaattcaccaagcgtctgctgtgcaccagttactgttttaggagcccagggatgtggtgacacccgagataaacacaaggtcccacatttgcaggcctggggacattgtctgaggagcgctaaatcagcaatcacttaaaacaagctgaggggctccaggatgctgggggaggggctctgcttagagggaggctgagggcagagtcgtgcttgtggtaagagctctagcagrggccagctggcaagtcctgatccactccttagcatcccggtgaccactttgtgcctcagtttccttggctgtcagttgtggatcttgacatcgtctaccctagagggttgttgtgagtggcgagctgatagaagtaaagtgcttaaaatagcgtctggcactgcaggagggaagacctcctctgggaatgaacttgtgggcctggcatggccaagggcatgcagtgggggggatggggaggcaagggacgcctgtgatggaggctgggctccagccatgctgtggcccgctgtgctttcctggcggggcgatcatgggcaaatgcctcagtgtccccgaatctcagcttccttattggtgggaggattcggtgagtggcttccctggtggaaagtggccttggccagagtagacatctgtggctggactgtatacagagccctgcccaagtcggacacagccccccaatctccagtgcactctgtctttttttttttttttttttttttttgagacagggtctcactctgtcgcccaggctggaatacagtggagcgatttctgctcattrcaacctccgcctcccaggttcaagtgattcttgtgcctcagcctcctgagtctctgggactataggcatgtgacaccatgcccggctaatttttgtgtttttagtagagacggggtttcaccatgttagccaggctggcctcgaactcctaacctcaagtggatctgcccgccttggtctcccaaagtgctgggattgcagacatgagccaccgtgcccgacctcagtcttggggagcagagagaaggcagacagagaaccccatctcctctgctggggaagtggtctagggagcaccttgaagagaatggcagctaaggagaggtaggggagaggctggcctggccagagagaggtgagctgcaaaggagggggacccaggggcctgcagggtgtctgtggtcagccctgctactctctgcctttcctggctggaatgctatccctggcctcccagcactctctgggttagaggctgcaggcggtcctgattagcacacatgggagcctcaccttgggaccttgtccagggaaccgtggttctccctccagtttcctcccattaaatggagggggctttcgaggattggcccacacccaacataggtgaatccttggtctcctgagcctgctatgtggcctggaagagaagatgtatcccaagttgtccaggtgtgggggtaggtaggacacagagtagccctgggaatcctgcccaagaccccctcgtccccagtgattgaggaggagtccctttccccggtgtagtttatctgtcccaggggccttctccggcaccctctggatctgcttcctgatctcactctggggaactgcttggggagcttcacgtttcagtctcaaggatcgcgcagggcggaccctcagcagcctccagatctgcccagaaagtccacggtgccggccctgccacttctttgtttggcttaagagacagggtcttgctgtgttcctcaggccggcgtgcagtggtgcgatcatagctcactgttagccttgaaatcctgggctcaagcaatcctcctgccttagcctcctgagtagctgggactacaggtatgcgccaccacggctggctaatttttwaaaaaaattggctgggagtggtggctcacgcctgtaatcccagcactttgggaggctgaggcaggtgaatcacttgaggtcaggagttcaagaccagcctggccaacatggtgaaaccccatctctactaaaaatacaaaaattagctgggcgcggtggtgtgcgcctgtaatcccagctacttgggaggctgaggcaggagaatcacttgaacccaggaggcggaggttgcagtgagccaagatcatgccactgcactccggcctgggtgacagagcgagactctgtttttttttttttttttcgttttttgttttttgtttttttaattacgggccaggtgcagtggctcacacctgtaatcccagcactttgggaggccgaggtgggcggatcacttgaggtcaggagttcgagaccagcctgaccaatgtggagaccccttctctactaaaaacacaaaaattatccaggcatggtggcgcatgcctgtaatcccagttactctggaggctgaggcaggagaatctcttgaacccaggagatggaggttgtggtgaccacagatcacacaactgcactccagcctggtcaacaagagcaaaactccgtctcaaaaaaaaaaaaaaacaaaaagacatagagatgggctctctagtatgttgtccaggccggtctcaaactcctggacataagcagtcctcccctccttggcctcccaaagatctaggattacaggcctgagtcactgtgcccagcccaacctgccactttgacactacacagctctgacttttggttgaagaatctggagtccccagttgccccccctccccctgtgcttgcctttgttccccaaaaagcagttacatgaaggaaatggagaccaggcctaacccagggctgaaggagttgggtctggagattctaggcccctcctgtgtctcctctggtgttgattctctgcatcgcttctttattttattatttttttttgagactgagtcttgctctgtcccccaggctggagtgcagtagcgtgatctcagctcactgcaacctccgcctcccgggttcaagcgattctcctccctcagcctcccgagtagctgggatcatagacacgtgccaccacgcctgcctaatttttggatttttagtagagacggggtttcacccatgttggccaggttggtctcaaactcctgacctcaggtgatccaccagccttggcctcccaaagtgctgggattacagacgtgagccatcatgcctggccgcttatttattttaattgttgtttagtcagtacacacacatgcccaggccttagttctgtttgatgcttttgacaattatggacacccatgtcaccaccacccaaagccagacatggaacttgttcccctctgggtaggtttgttcagtgggacagcccctctttccctgtctgttcctctcatcatttgtcccctgctgccaggcggggcattcttgtaaacaggtccagactgggtttggggggctctgtgcccccccacccctgccaggagaacccccttttattcttcctttttgtctgtctctttaaagcgattcattagccttggcaggcgtgggtctgagctgttttcctttatgtcgttggcaggtctttctcccgctaattgtgttctcggagctggggttcatttttgccggatgtgttacacatgtgcaagcgtagtggttttatgtatagaaaacctgcccagcggtgtgggcatgggtgctactcctggcgaggactgcagaaaggcccctggccaatcagtgctctcgtgaaagagggatgctcttgttaaccatcccgggcagggggcatgtgaataaataatcaaagactggggtgcctcttgcagactgagggagggacattccagagaatttgctgcattcttccttgaacaggacgggaaggcgaagataggctggagcttccagatttccatcctgtgcccttgagggaccctctgcaggagcctggctctgcctttgagccctggagcccctagatgcaggatgatgggatgcctggctcttactcccgctcacacactccaagtctcgctatcaggacagccccccacagggagccacagcagccacagctcactccctcatttcttttttttttttttttttttttgagacagggagtgcagcggtgtgaacacagctcattgcaacctcaacctcccaggttcagttcatgctcctgcctcagcctcccgagtagctgggacggcaggtggccccacacctggctaatttttttctttctttctttctttttttttttttttttgaaatggagtttcactcttgttgcccaggctggagtgcgatggtgtgatctcagctcaccacaacctccacctcctgggttcaagtgattgtcctgcctcagcctccccagtagctgggattacgggcatgcgccaccacgcccggctaattgtgtatttttagtagagacgggttttctccatgttggtcaggctggtttcgaactcctgacctcaggtgatccacccgcctcagcctcccagcctgtagctgggattacaggcgtgagccaccgtgcccggcctaatttttgtatttcttgtagagacggggtctcaaccatgttgcctaggatgctctccaactcctgggctcatgcagtcctcccacctcgaccacccaaagtgctgggattacaggcgtgagtcaccatgccccgccccctccctcatttttatcttttatctttttttttcttttttagagatgggggctgggtgcggtggctcacgcctgtaatcccagcactttgggaggctgaggcaggtggatcacaaggtcaggagttcaagaccagcctggccaagatggtgaaaccccatccctactaaaaaatacaaaaaaaatttagccgggtgcagtggcaggcacctgtaatctcagttactctggaggctgaggcaggagaatcacttgaacctgggcagcaggagttgcagcaagccgaggtcgctccactgcactccagcctggatgatagaatgagattccatctcaaaaaaaaaaaatggggtctcaatattttgcccacgctggtctcaaactcctggcttcaaatgatcctcttgcctcagcctctcaagtagctgggcctcctgcctcagcattctgaggagctgggcctcctgcctcggtgtcccgaggagctgggcctcctgcctcggtgtcctgaggagctgggactgcaggggggcaccaccatgcccagctcactccctaatttgtataagaggaaactgaggcactaaaactttggtggcagagttgggatgtgaacccaggtttggccctgatccgttcacttggccatcagccctgcagcccctcctgccacttttcccactctctgactcctccacagggcagtgcaaggccatggaggaagtgcctgcccaaggcttacccctgctgctcctggtccttgtcctgtgtcaccgtgttggccatagcgacctcttccagagctcgccaaagccagggtcccgtctcccctggttcctgccgtgtgyctgatttctttgtggcatcagtagtgtctgcccccttcgcctgtgccacatctggaatcacatctggcgaagcagcctgcaggtcctggggcggaaggcggccttcctaacccaaacatactgttctctgagccttggtggggccagaagggctcctggagcgccctgggacctggcagagggccttcctgcagctttgtggcccaggacatcctgtgtctctggctgatggtcaaaacctttccttattctttatttttttttaaatgttttactttttgtagaagcagggtcttgctttgtcacccaggctggtctcaaactcgtggtcccaagccatctctctgccttggcctcccaaagcactgggattacaggcatgtgccagcatgctctgactcagactctttcaagaggtgcactaggcagggacttcaagtgggcctcagccccagggcagcttctccctgacccaacttcgatttcctccattggaggctgcctccgctccagcctctctggagcgcccccctgtactcccctcctctgggtgaggcccttttgccagcctgaaggcaggccccagcccagcttgctgcactgagctctctgtccttggcaatgagagccagggtgtggagggtcccagtcgctctgggagatgatccccctcagcagcctggggtcttcttgccgctccatgacacgcctcattcagcccgaccttccaggccactgtgggtgtctcctctgcaaagggcctcctgctggcctagtccccatagagagctgcagcccagctcctgccatgtgtcacaatgtgacrgaccctctttagcaccaggaagcaggcttgattgcctccttgtagtggtgaggctcaggggtcaactagcctggcctggcattgcccaggcccagagcacaggtagaacctggggtcccctgagcgtggcccccagtacctcccagctggctctctggaggctgggatggaatttggctgtctttggaccagcttctgggtccccagctgagccacctggagactgtcatcgctctgttgcttggtttcccctcttaaaaataggactaaggtcgacctggagggtggtttsagcactaaccgaggccctgcacagccaacacctaagagtgcttcctggggctccataaatcacagcttcaaagtcttggcccgcgggagaagaaagactgggcgagctggcccagcagacagcatgtggagcgagggggctggtgcaggccggttttgtggctttgcaccgcgcccccaccccctaccctccacaaccccatgcttttcataattatccactaagctcccgcgctttctggggctgtggaaccccagctcacatctgctgtctcttttgtagtgcacaaagccccaggcggtggcagctgattagcatggatgcaggagacatttgcatgtaatagctcccagtgaagggggtgccccgtctctttttcagaaaagccaagctctttgtcttggccttctattcttggggttgcccttcgcacaccccacaactgagcagactgtcacccacaggtcaggactacaggggaagctgtcgacccttgaaggtggagcttagggaccagaccttagagggagccccctactgagtgccccccaggcctctgactgaagaagcttcacagtgatttatgaggtttgggtgtcctcagttcagggggctttctccagagcccacctagatggggcacgcattgagtgctctgtctcctgagatctgacctggcagtctggggcagggggaaagggcagctgccccaagtagtgcttgggggcaccatggaggccttggcctacctgagatgccaacaggacacccacagacacctctgttccgtaggtggctgcctctcagccctgcccatacaccacccagtgtcctgtcactgcgcaatttgagaatttttttttttttttttgagacagagtctccctttgtcacccaggctggagtgcaatggtgcaatctcggctcactgcaacctccgcctccccagttcaaaggattcttctgcctcagcctcccaagtagctgggattacaggtgttcaccaccatgcccggctaatttttttttttttttttttgtatttttagtagagacggggtttctccaagttggccaggctggtctcgaactcctggcctcaggtgatccgcctgcctcagcctcccaaagtgctgggattacaggcgtgagctaccatgcctggcccagaattgtttattaccttctgtaatcctacattcttggggactcctgaagtagattcaacactttgactttgtgagttgccaatgcatttccaagcccggatccaaccgtggaccctggccttttgggccagcagaagaggtggctgttttttctcatgaaatatttttgaaggaatgaagacgaatgcagccaacacctgtgcacttcccaccctcattttaaggaaaccttgcccatggaatgaagccccccatccaatcccctccccagggaacagctttatactaactctggtggtcggcttttggaggggccataaatggcctgaaaagctaacctgtaacctgtaaagcttaaactttacaggtgggatgtaaatgttgaggcgggaggatcgcctaaggctgggagtttgagaccagcgtgggcaacatagcaagaccccatstctacagaaaaataaaaaattagccttccatggtggtgcatgcaagcctggggtcccaggtactcaggtggctgaggcaggtggattgcttgagcccaggagtttgagaccagcctgggcaacatagggagaccctgtctctacaaaaaatataaaaattaggtggtttttttgttttttgttttktttgtttttttttttttttgagacagagtttcgctcttgttgtccaggctggagtgcagtggcgcgatcttggctcactgcaacctccgcctcccgggttcaagtgattctcctgtcttagcctcccaagtagctgggattacaggcgcccaccactacacctggctaatttttgtatttttagtagagatggggttttaccatgttggccagactggtttcaaactcctgacctcgggtgatccacctgcctcggcctcccaaagtgctgggattacaggtgtgagccaccccaccgcgcctagcctaaaaattagttttgtgtggtggtacatacctgtggtcccagctactttgttttatttacatatatatatgtatatgtatatacgtatatatgtgtatacgtatatacatatatacacacatatatacacacacatatatacacatgaatatatagacacatatatacacatgcatatacacacacacatatacacacacacacatatatatatatatatwtwtttttttttttttttttttttttttcttggtatagctctatccttcctgaagtcccagctccttaggaggcggaggtgggaggattgcttcttgagcacaggaggtcgaggctgcagtgtgctatgactgggcgggccattgcactccagcctgggtgacagagggagaccaaaactgagtcagtgttcccaagcagtgtgtgaagctgattctctgtcagccacgtgccaratgggttgggtcccaggggtggccacctgggggacagggccagacacttgttctgggcccaatatggccttgtgtccagaactctctcggtggctccttctctcgaccctttgccttgagccggagcactgtggggacacaggaaccaagactggtgttttgtgccaatgccacactactgtgtgcccgtgggtcttgggccgggcatgggtgggttcgtcctcatggctacacagtgaaccatgtgttattttatttttctagacactaaagctgaggtgtcgggaggtgatggtcccttgcttgcaggtggcagagctcaggttcaaacctggatcttactgcacctggctcgtttgggaggcctcccttgctggaatgcaggtcagggagccccgatgcccttgggctgactgccccacgtccatcacacccactgagggccgtggggtgggtgcagggcttgttctgggagattccaagctgaggaaagcagggctgtccgccagcctccagctgggtcacagaagaggctcagggcctgttcccactcccctccccmagccagcagggtccaaaaggatgttgggggggtggtccccagtccggcctgcccactctagggaggggcccagataacttgcgtagacgccggccctcccgcccccagccttcgccattgccttttgtctggctatctttcatgtacaagggagaaattcaagccactcaggagggtgtaacatgaaaagtcagtctctccttctctccgcactgcccgtgacctgtggtttctcaggcacatacaagcgcgcacgcataaatctctcctccaacctgctgggcttcaagttatgcacgttcacacaatggcagaggagggtgcggattgaaaagtatgacttgcttcccggaggcagcactgaagtcactttattgtgtttccagacaagccccatgaatgcagtgtgcactgcccctcctccctctgtcccttccccgcccatctgtacacctgtggtgcgtaggttttacaccactctgtgccttacgttgtggctcgatcatttaacatgtcagtgtgtaccgatggaaattgatctcttttaatttgccacatcttcatttattcattctttgattaattgatggatatttmggttttctgctttgggggcattcagatccaggtgtatctctgcaagtagagcttgtagcatacataaggccctgcaaagggatttctgggccggaagtttttgatcagttgctcagacatagttctgatgtgctggggaagtgcccgttcagggccatggctgcagggctcctggacacccagctccggtgctggagtggggttgggattcgcccagaggccagggctgcgccagaggagcccagggtgacctcatggtcctcagatacccggggctgggcagcacagtggaacagctgctccagagcttctccgaggacgacatcggaggatccgactcaggttacggcaggagagggaggccaggccgggttagggttctggggtttgggattctcttccgaggctggcattgatctgttgctgatgatggtaacagcagctgctcttgtttatgaagtacttaacacctccagctccctccattacctaggaatcytcactgcagggaggggttttcatccccattttgtgcctattttatttatattattttattttttgaggcagggttttgctcttgttgcccaggctggagtgctatggcacgatttctgctcactgcaacctctgcctcctgggttgaagtgattctgctgcctcagcctcttgagtagctgggattacaggtgcccgccaccatgtctggctaattttttgtatttttcggtaaagatggggtttcaccatgttggccaggctggtctcaaactcctgacctcaggtgatccacccgcctcagcctcccaaagtggtgggattacaggcgtgagccaacactcccggccctgcccattttatttatttatttttatttttatttttttcagatggagctttgctctttttgcccaggttggagtggaatgcaacctctgcctcccaggttcaagtgattctcctgccttagcctcccgagttgctgggattacaggcatgtaccaccatgcctggctaattttatattttgagtagagacggggtttcaccatgttggccaggctggtctcgagctcctgacctcacatgatccacctgcttcggcctcccatagtgctgggattacaggcgtgagccactgcccccactgtgcctattttatttcattttgagacagagtcttactctctcccccaggttggagtgcagtggtgcgatctcggctcactgcaacctccacctcctggcttcaagtgattctcctgcctcagcctcctgagtagctgggactacaggcacccgctaccacgcccggctaattttttttatttttagtagagataggttttcaccgtgttagccaggatrgtctcgatctcctgaccttgtgacccgcctgccttggcctcccaaagggctgagattacaggcgtgagccaccgccccctgtcattgtgcccattttatagatggggctcctgaggccaggggtgaaggcaggtgctagttcgggggatccaagccctgccagactctgctgcatgtgggctctgacctagtgaagttccaggatggtgccctggggccgggctgtcaggccctccacgtgggttatgtcacctcaccctttgggatgtgtcagggtggtggttgaacagatgaggaagccaaggccagggctggagaacagtgggttcggccctgaacccagtccctccttgataaacctaagtcctccttgatgccaaagcccatcctttcagccatctccctgctgggtgaccctagggtcatctctgccgcctcttgggcacatgggtgccaagccacacaggaatggggggaagcttctggttcccagtttggaaacaaggtcacctctgccagggcagtggggcctggctcaggtgtcgcctcctcccgagtctgcctggaatctgaattgggcctggtccgcatgcatcagcttcygtgctttccctcctctcagcgcttactgccagttcctgttgtccgtctcctcactgccctgctgggtgctgtctgcctcccactgtggactcccagcatgggagggccgggggtggctctctgkttcaccgccaggtcctctgtgcctgcatgtggtccgggcagagcaggctgagcagagatgccagctgagtgggcttcagaaagcgtgtttttttttccgtgcctgtgggatgggagttggccacggggggtcggggtgtctccctctttttacctaactctcctcctttgatcgggaatattttcctctggaaggtgaagagcccatgttgtctttggcagcaggaggcgatttaatacaagacgtaccatttggacaacggcttctacagctaccagctactcccccgccccaggtttgccgagataaatagctttaattattcctccatttggtggctacagttgtgttccccctggagatgcaagagcttgaaatgtggcctttctcccccgagctgctgctgcttttcttcttgccctccacctccttgtgttttttttttttttctctctctctctttttttttttcttcttgaaatggggtctcactctgtcgcccaggctggagtgcagtggcacgatctcagctcactgcagccttgacctcccaggctcaagggattttcctgccacaacttcccacatggttgggactacaggtgcgcatcaccatgcccagctaatttttttattattatttgtagaagatggggtctcactgtgttacccaggctggtctcaaactcctgggctcaagtgatcctccccgctcagctttccaaagtgttaggattacaggcgggagccactgttcccagccggcctccttattctctatctgccaaagaatgtggccctgatgtcacgacagcatgggaggttctctttttttttctttttgagagagtctcgctctatcacccaggctggagggcagtggcgtgatttctgctcactgcaacctccgcctcccaggttcaaattattctcgtgcctcagcctcccaagtagctgggattacaggtgcccaccaccactcctggctgatttttgtatttttggtagagatgaggtttcaccatgttggccggactagtctcaaactcctggcctcaagcgatccacgtgccttggcctcccaaagtgctgggattacaggcgcaagccactgtgcctggcctagggatgggaggtttgaagggactccaggtccccctgacccaggtctaacgagcctcaagggcccaaagaccccctgcttgttccgttgctttctggaagcaagggggaggggaaggaggtgaacaaatagtgctgctgtgtggccacctgatgctaaacatctctgcgtggtgaagccacttccccaatcaaggccatgcgcacagtgagggcaggctagcactccaacttggacacctagacccctgaacccactgccccctgtgcttagggaagaggctgggctgcccctgcccctatcccggggagggcattctggtcagtacccatgagtgccccttgtgtgctaggtactgtgtgggtcatgcccagagccctggatctgcgctttgtggggctgtcaggtaggcattaaataatgagctgccaggcagtgagggcttgtccgggaaatgctggaggacctctaggaggaggtgacaaggaagcaggggaagaggggagggtgatctctaaggagcatcagaggccagagagaacctctgcccatgatcttgaccgggagagagtgttgaaggccagcgaggtttggctggagtgacccagggggcagcagtgagactgcagacattggcagggggctggttccggaaggtgctggggaaccgtggggcggtgtgaagcaggcgggttgtgttagacactgtgcggcttgaagggtggactgggaggtgactgaggcatggtatgtcgcccggcaccatctgctcagtgagacccttgagagacgtctccccgttcttccaagaccctcctgcatgctgggacccagggctgccgtggagctgcttgctgccccacccaccattctctagtgtattttcttcaagtctggggctagggaatccttataccttagagtcccccagattctgctgccctggggggccaataaggaggggatgtgcagcatgctgactctaaggcaggtggggaacagcagccagtccaccaagagctgccctcttccccatccccattgcctcctgcctggccagccatagcacttggctccttccctatcctgtgtgacggtgggtctctccccaccctgcgcaagatccctcccagtgctgcccagagccaagccaccagtccactggggcctcttgcagtccctccacagcgcccctacccacatcaacccacgtttcttggaggtctgtcccagtagcctcccagggctcaccacactgtctgggccacccctgtttccctgcgttcctgcactcttccccttactggcatatctgtccccagtctccttcccaggctgggtcaggtgccacctccaggcacctacagagtccaccacttggggatctctgtcagtctgccactcggctgtcctcaccgcctctaggatggggagtgtgtctccattgccgagtgcctagtgagcagatagggaagtgggtggcgaggatgctgagggtccagcctctgctctgcacctgtaatccttccgggttttgcaaatgaagctttatgggcacacagccatgctcatttgtttacatattgtctgctgcaaggcagaatagaatcattgtagcagagatcagattccccagcagagatcagattccccaggaagcacacaatatttactgtctggtcctttacacagaaagtcagccaaggcctgctctaggaagcgcagagacattgggtggtgcattggtgaggaatagggatgctggtgccagtcacctcggccactcttgctgtgtgaccttgagcaagacacttaacctctctgagcaaataagggcatagtgagagtagatactcccagaagtgatgagaagaggaaacaggaggtcgacataaggcaccggaacagagcctggctgttagagtgttgtcactcttatgtcatgtgacatcccagcctctgcagggtgtgggcaggcctggctcatggcagctgggggtttgtgacctggattcacatggtggagggctgcttcctgggaagcaagaaaggctgcctcaaagatggggcaatttttctacccccttccctgcagttccagcccctcctcccttggccccagagcttcatcagggccgactgcagtgtggcaggccagcgagtagccccaggctgggtccaggggtggccaaagcgtaacactcagtccgggtttgtgttctttacgttccccgttggagactccacctggagatcccagtccctttccttttactgcagggtaaagaaatgctagctctgggccgggcacggtggctcacaccggtgatctcagcactttgggaggtcgaggtgggtgaatcacctgagatcaggagtttgagatcagcctggtcaacgaggtgaaaccctgtctctaggctggatgcggtggctcactcctgtaatcccagcactttgggaggctgaggcaggcggatcacgaggtcaggagatcgagaccatcctggctaacacggtgaaaccccgtctctacaaaaaatacaaaaaaaattagccgggcgaggtggcgggcgcctgtagtcccagctactcgggaggctgaggcaggagaatggcgtgaaccccagggagtggagcctgcagtgagccaagattgcgccactgcactccagcctgggagacagcgagactccgtctcaaaaaaaagaaaaaaaaaaaaagaaaccctgtctctaataaaaatacaaaaattagccaggtgtggtggtgcatgcctgtaatcccagctactcgggaggctgagacaggagaatcgctggaacctgggagatggaggttacggtgagctgagattttgccactgcactccagtctaggcgacagagtgagacttagtctcaaaaaaaaaagataccccagctgtggcctggcctcaattggcctgaactcaccacggcctcctggctctagagtctgctttttggtcacccttgcctgctagccctgcagcctgtcccccacctctccaggccatgtgcacacagtccccaacatgcgccggctgatgccgcaacagtggtgctttttggatttgtctctagaggccaacacagagggcctttctgaatcctggggtcctgcccccttccgcggctcccatactgctcctccccagctgaatggccgctttgggaggtggttgctggccttgagaggatgccacagtgagtttcctgcgggcagggctgcatctgtggcgagcactgaatcgccactgctggatccagatgcctgtgcgtcccgggccccaaggctcccttctaccctcctcctggggtgctgttcgcaagccaggagacaggctgtgcattccctgcctactcagaggtgaccctgggccaggtgtgcgatggcccactggacccatagtagcagagggaggggagaggaagggagaaagtgggaacagcatgtgcagaggcctggggcctggcccatgtagggactagagggttgagtgtgtccatggggaggggccaagacggggagagccatgaggaatgatgggcacagagctcagaggctcgggagtctcctgaacaaagagaggaacacggcttagcttgttttttttttttttttttttggtttgtcagtatttcccaggtgtcttctgtgtgccagggactaacttggggataaagctgtgactttgagaagctgccggctccgcgggctttagcagctgctgctgtgatgaagcgatccacttgccctcagccccggcatctttggcccaagcccagccctagccctggctgggcacagccaggcttcacttggccacaggtcctgtagttgcctgcctggygccaggtcagagagggacgcctcaggcaacatcgggttgccaggctgcttggtaaacaggcctccctgggcccacttgctgtcgcccaggtgtggctaacagatcgacagtatctcctgccccaggacgggtatgagtgtgggcaccatgccaaggttggatgtcccttcctgggacccacccacagctgggagcactttatcttgggcctctgtgggtgtagtgaggctgtgagtctggggcagtggcctgctgacaccctcctggcagggctcaggaggttcctccatgccctgccctcaggagggcggcacctggctcctggggtgggagagagtctggcaggactggctgggtgtggccggggagctgcccttcaggtctcatatctgtaggccctcatacctggactcgtcagttaggaacagttttctttttctttttctttttttttttttttgagacggagtctcactctgtcgtccaggctggagtgcagtggtgccatctcggctcactgcaacctccacctcccgggttcaagcgattctcctgcctcagcctcctgagtagctgggattacaggcacccgccatcatgccttgctaatttttgtatttttagtaaagacggggttttgccatgttggacaggtgtgtctcaaactcctgggttcaagtgatccgcccacctcccaaagtgctggaattacaggcgtgagccaccacgcctggcccatttttcattttctattgaaacaaaattcacacctgtaatcccagcactttggaggccaaggtgagaggatcacttgagccccaggagtttcagactagcctgggcaacatagtgagaccctcatttctacaaaaaaataaacaaaattagccaggggtggtggcatgtgcgtgaggttccagctacccgggaggctgaggtgggaggatgtcttgagcctgggaggtcaagagctgttgtttcataacatgaaattagcccttttacaatgttgcataacaatcacctctatctactcccaaaatatgtttgtcaccccaaaaggagaccccacatccattaagcagttgctccccattcctgccttctcccagctctcagccaccagcagtgtgccttctgtgactatttcatataaatagaatcatttgtgtctggcttctttcggcatgatgtttctgctattcattcatgttgcagcatggctcagtgcttcctttatttttatggctgaataatgtttcattttatagataagccatatttgtttatctgtttgtcagtttatggacatttgggttgtatttctatcttgtgtctgtcgtgaataagtactgctgtgaatgcttgcatacgagtgtctgttggttttttttgctttgttttgtttttatttttatttttttgagatgagtctggctctgtcgcccaggctggggtgcagtggcgtgatctcggctcaccgcaagctccgcctcccaggttcctgccattctcctgcctcagcctcccgagtagctgggactacaggcacccgtcaccacacccggctaattttttgtatttttagtagagacggggtttcaccgtgttagccaggatggtctcgatctcctgaccttgtgatccacccgcctcggccccccaaagtgctgggattacaggtgtgagccactgcacccggactttttttttttttttctgaagcggagtctcactctgttgcccaagctaaagtgcagtggcgctatctcagctcactgcaacctccacctccctgattcaagcaattctccctgtctcagcttcctgagtagctgggactacaggcacccaccatcatgtctggctaatttttgtgtttttagtagagacggcattttgccatgttgaccaggctggtcttgaactcctgacctcaggtgatctgcctgcctcggcctcccaaagtgctgggattacaggcatgagccactgcacttggccagctttttgtttgtttgtttgtttttgtttttgtttttttaaagaggtggagtcttgctatgttgcccaggctggagtgcagtggctgttcacaggcagtcatagctaactgcaaccttgagctcccgggctcaagcaatccttccacctcagcctcccgagtagctgggatctcaggcatgcaccaccatgcccggctaattttgtttatttttttgtagcgatagagatggggtcttactatgttgcccaggctgaccttgaactcctggcctcaagttatcctcccatcttggcctcccaaagtgctgggattacaggcatgagcctgtgcctggccctggctatctctttgttgttgagttaaaaaagttcttggcccagcccagtggctcatgcctgtaatcccagcactttgagatgccgaggcggacagatcacacgaggctaggacttcaaaaccagcctggccaacatgacaaaaccccgtctctaccaaaaatacagaaattactgggtgtgatgatgcatgtctgtaatcccagctactcaggaggctgaggcataagaatcgcttgaacgcagctactcaggaggcagaggttgcagtgagccaagatagtgctgctgcactccagcctgggcaacagatcaagaatctgtctcaagaaaatatataggccgggcacagtggctcacctctgtaatcccagcactttgggacgccgaggcagacagagcrcttgagctcaggagctcaagaccagcctgaccaacatggtgaaactccatctytacgaaaactacaaaaataagctggacgtggtggtgcacacctgtagtcccccagctactcgggaggctgaggcaggagaatccctagaatctgggaggcagaggtcacagcaagccaaaattgtgccactgcattccaggctgggtgatggagtgagactccatctcaaaaaataaatataataaaaatagatacaaaataattgttgtttcttttttttttttttttttttgagacggagtcttactctgttgcccaggctggagtacagtggtgtgatcttggctcactgcaagctccacctcccgggttcacaccattctcctgcctcagcctcctgagtagctgggactataggcacttgccactatgcccagctaattttgttttgttttgttttgttgtatttttagtagacacagggtttcactgtgttagccagcatggtcttgatctcctgacctcgtgatccacccatcttgccctcccaaagtgctgggattacaggcgtgagccactgtgcccagactttttttttttttttttgagacatgctcttattcttgtcacccaggctagagtgcagcgttgccatctctgctcactgcagtgtcaacttcctgggctcaggtgattctcccacctcagcctcccaagtaattgggactacaggcgcatgccactacaccgactaatatttttatatttttagtagagacgggatttcaccatgttgcccaggctggtctcaaactcctgggttctagtaatctgcctgactcccaaagtactgggattacaggtgtcagccaccatgcctgaccctaaaatagttttttatatattctggacactaaatacttaacaatagatgatttgcaaatagttctcctaagagttttcttgttttagctcttatatttaggtcattgctccatttgagttctgttttgtttgtatatggtgtgaggtaggggtttaacttcattcttttctctgtggttatccagttttctcaacagtgtttgttgaagacactattctttccccattgaatgttcttggcatccttatcaaaaatcaattgaggataagtataagggtttatttctggactctgattctgttccattgatctgtgtctcctttcttttgccagtaccactacactgttttcattactgtaccttcgtagtaaaatttgaaattgagacatgggaatcctccaacttcattctttttcaagactgttttggctattcagggtgattgagaacactttgccatatttgcactcatgttgttgttgttatgatgggctattcaaaagcaagctactgacatcatgggaatttgccataaatacttccgcatatgttttctaagaaaatatgcatttctctacaaaaccacaataccattgtcacatccaaataacttaaaattatggaatatgtagtccacactcacatttccctagttgtctttttttttttttttaataggatctcacgtctgttgcctagactagagtgcagtggcaccatcatacctcactacagcctcaacctcctgggctcaagcgatcctcccacctcagcctcccaagtagctaggaccacaggtgtgagccactctgtccagctccccagttgtcctttatttatttttttgagacaaggtcttgctctgtcacccaggctggaatgcagtggcacagtcatgactcactgtagcctcagcctcctgagtccctaagacaacaggcgcatgccaccatgcctgcctaatttttaaatttttttgtagagatggggtcttgctatgctgcccaggctgatctccagctcctgggttcaagtgatcctcctgccttggcctcccaaagtgctgggattagaggtgtgggcccagcctccccagttgtcctgtataacttttaaaaacatttttcgtttggctccagcccagggtcccactttgcattgcattgggcactcccctctttcttgtctcctgcactctggaatagctcccaccgttttggtctttcctgacattggcctgttcaaggagaccaggctggttgtcctgtagcctgccccacaacttgtccttttctgttgtcccttgaagatgagactagggcaaacatttttgccaagaatactacagatgatgtacctgtcccactgcagtatggcaggcaggggcacagtgcctgattgggctggcccgttcctggcatcgctaagtttcaccatttggctggagtggagtggctgcaggtttgtggaatgaatgactggtaacagctatcatgatgggtacagggagacagtgtcctaattcactagaccactgccccgccattagccccatctgatggtgagaaccccagttccagagaggctgagggacatgcctgtgtcacagtgaacaaatggcatggatggggtgtgaacccagcggtctgactccactggccacatgcagtcactgctctgcgcccatccaagaacagaagggctcagccgagcagggcagaggcagctccagctctgagttcctgtgggccagcaccatgccttgtggccctgtctgcccacctcagccttcaccatgcccgtctcagccctgatcatcctgaggacacaggctgtgttcctgctgtctgatcagtcgctcccttgtcttccatgtgggctgggcagtcagggcacccggcaatgctgccagggtggttttgtggcactctggaagaatctgggggcaccaaggggaggcagcaggagggcgacagggacccaggctcaaaagaaggcagctgacagggctgcaccgctcacgccagcctgtcttctctcgtagatgaagatgtgtgtgtctttaagtgctcagtgtcccgagagacagagtgcagccgtgtgggcaagcagtccttcatcatcaccctgggctgcaacagcgtcctcatccagttcgccacacccaacggtacgtggccctccttccattccggtgacaccagcccaaagcgcccagagccctggtgggcaggggcgtagagcctggctgaggggtggcccgtgcatccttaagaaggctccactgccctcaaaaccacattcccacatgcaggtatgcccagaatacactctggcctgggcagaccctggatcccagaccctccctcaccggctcctccgggtcttttggggcttggcttctatgtccccacctccaagaggcccatcctgaccacctgggaccagtctttctggcagtggccagccctgggccagctgtgactgggccagyttrkggatggagtgaggcgaggtcctagaggcaggaagagtttgctcagggcgcagagaagccaccagaagggcttaaccaacccaccttgggggcacaggtggacacaagattcctgactaggggtgggagaaccccaggtggatgcagccagggtagcagagaggtgtccaggaatgcccagggctggagatggtctgaaggtcccaccgcaggcttggttaccagagacctgaagtgagtccagtggttgacacaggtgctggtgcgaggacagctggaggtggagaggctgcgtgcccatgagccactgccggcctcccccttgtctcaaggtagctgtgcagtgacccagatgtaccttgggcagcctgagccctcggggccagctgtgtgaagctgccatgcctggctaattttttgtagagatgggttttcactgtgttgcccaggctggtcttgaactcctggcctcaagtgagccacctgcctcagcctcccaaagtgctgggattacagatgtgagccaccgtgcccggccccttttttttttttttttttttttttgagaaagagtgtcactctgttgcccaggctggagttcagtggtgctatcttagctcactgcaacctccacctcccgggttcaaggcgattcttatgcctcagcctcccgcgtagctgggactacacgtgtgtgccaccgtgcctggctaatttttgtgtttttaatatagtagacatggagtttttcatattgcccaggctggtctcaaactcctggcctcaagtgatccacccgcctcagcctcccaacgtgctgggattacaggcatgagccactgcacccggccgttcccactcttaagactatttgtattttaatattttttatttcagttctgtcagtttttaaaagttgtgctaaaatctacataacaaaatgtgatcattttaacccttttgaagtgtgtaggttggtagcaagcagcacattaacattgttgtgcaactgtcactaccgcccatctccagaacttgctcatcccgaactgtgtcttttcattgtttttgagacggagtctcgctctgtcacccaggctggagtgctggagtgcagtggcgcgatctcggctcaccgcaacctccatctcccaggttcaagcgattctcctgcctcagcgccctgagtagccgggattacaggcacgtgccactgtacccagataattttttgtatttttagtagagacgggggtttcaccatgttggccaggctggtcttgaactcctgacctcaggtaatccgcctgcctccgcctcccaaagtgctaggattacatgcgtgagcaaccatgcctgaccgtgtcttttaatttttaaagagattgtcttttaaatattgttttgttttttacttgatataatttagtggctattattctatgttaataaatatagcwttattttattttattttattttattttattttattttattttattttattttattttattttgagacagagtctcactctgttgcccaggctggagtgcagtcacacaatcttggctcactgcaacctccacctcccgggttcaagtgattctcccacctcagcctcctgagtagctgggattacaggtgcccgccaccacccctggctaatttctgtatttttaatagagacagggtttcaccatgttggccaggctggtctcgaactcctgacctcaagtgatccactcgcctcagcctcccaaagtgctaggattacaggcataagccaccgtgcccggcttattatttcttgtagagacagggtcttgctatgttgcccaggctggcctcttaaactgggctcaagcagtccacccgcctcagcctcccaatgtgctgggattacagttgagaaccactgtccccagccaaatagatagagcctgctttaaagggccacataccattgcatctctgggaagggtggtgattggtgattctctgccatgcttttcttaattttttatttcatgtttttgtttttgttttttaacgaggcagggtcttgttatgttgctcaggctggtctggaactcctgacagctgatctgcccacctcagcctcccacctcagcctcccaaagtgctgggattacaggcatgagccactgcacctggcctctactgtgcttttctgtgcccctggcatttgtccagtcccctcttactggacattgcagtgtctgctgcccccacacagatgctgccctgagcttctgggtggacttgggcttatttgccagagctttgactcctgggccrgtgggcgtgtgcttgagagagcttcaccaagctgccctttggtgaggaatccccaggcccactcccaccagacagcagccccacatgcaggctacctgccctcttctcatgtcagtcaccacagtgcaggcatggctgcccttcatcttttctttgaactttgaaaattgtttttcggggaagagaaatcaccagccctgtatgttcaagggagaaacgtcaggacatacggccatccagaaccttccctcccagatggccacatgctgggttgctgaccgccccccggtgacttggcttccctgttccagatttctgttccttctacaacatcctgaaaacctgccggggccacaccctggagcggtctgtgttcagcgagcggacggaggagtcttctgccgtgcagtacttccaggtgggttgtactccccctcagccaggccgcctccccccggcagcccccctgccactcacccgcaggaggccacacagcacagggaaggcccacccaagttcccgtcctggctctgtcccttactggccatgtagccttgggcaggtttcctctgctggctgggcctcagtttcctcatctgtgaagcggagatgcaggtgcctgcctgagagggttgctggaaggatctgagcacaggtggagctcagggccacaggcgttgtgaataacggtagagcagttacaatgccctgagcgctccctgcatgccaggccctggtctaagcgctgtcacatgcacagaagcacttggaccctcccaacaacgctaggaggtaagtgctattattgtccccattttacagatgagaaaactgaggctcagagaggttaagtgacttgctccaagtcacacagctatatgcaacagagccaagatgggaagccaggtctgcctgatgccaaagtctgtgcccctgcccaggtgccacgctgcctcccgatcgcccgttgtcttacagagagacaccacacctcacctgcctggcgctctgagttctagggctctgttcgatctgcttctcttcttctttggggccctcaagatgaggcaggtggcccccgatgccagaaccctgcctgtggcaaatcttgagttctcctgggcggcttccaggtccagrcggcatcagctgttgccatcggctgcagtgatagtggmggtgtcctcctgggggctgccctccggcttcctgctccctctcctggagctgctagtggggcccaggcagagggtgcacgacctcccgagggaggtttgtgccctagatggccccttgctctatcacagggctggccagggccttggctgcctcgtgccaccatgtgccccgtgccatcggtatgtctctgttccagttttatggctacctgtcccagcagcagaacatgatgcaggactacgtgcggacaggcacctaccagcgcgccatcctgcaaaaccacaccgacttcaaggacaaggtgagtggcccgcgcatgtgcccacctctctgcttctgtctcggttttttttttctttgctcattgattttatctttaattttctcagattagaaatgcatttatctcagytactgcagaggctgaggcaggaggatcgcttcagtccatgagtttgaggctgcagtaagctatgattctgccactgcactccagccygggcgacagagcgagactcttgtctcttaaaaaaaaacaaataaacaaggccaggcgcggtggctcacgcctgtaatcccagcactttgggacgcccaggcgggcgggtcacaaggtcaggagatcgagaccatcctggctaacacgatgaaaccccgtctctactaaaaaatacaaaaaaattagttgggcgtggtggtgggcgcctgtagtcccagctactcaggaggctgaggcaggtgaatggcatgaacgcaggaggcagagcttgcagtgagctgagatcgcgccactgcactgcagcctgggcaacagagtgagactccatctcaaaaaamaaacaaacaaacaaaaaaaacaaaaagcaagaaaaacaaatgcatttgatatataaactcaacacagcatgtacattataggcttgagaggcctctatcagttccctccaagatagccgctacccctcagtatgaggtctcttcttcaagatttttccccatacagacatcagcgtatattttacaattattttattgagctgggcagagtagctcacacctgtctgtaatcccagcactttgggaggccaaggcagggggatcatttgagcccaggaagttgaaactgcggtgagctgtgattggggtactgctctccaggctgagccaaagtgcgagaccctgcctcaaaaacaaaataaataagctttttgatatcaccaaataatgtgcactcatgattaaagagagagagaacagagcagaacgtctgtattcaaaagtagaaatcggccaggcacagtggctcacacctgtaatcccagcactttgggaggctgaggcaggtggatcacttgaggttagcagttcgagaccaccctggccaacatggcaaaagcccatttctactaaaataaaatacaaaaattagctgggcgtggtggcaggcacctgtagtcccagctactcaggaggctgaggcaggagaatcacttgaacctgggaggcggaggttgcagtgagccgagattgtgccactgcactccagcctgggcaagagagcaagactccgtcttaaaaaaaaaaagtagaaatgtataatgtattcccttctcatcccatttgccagagtttttggtgtctaccttttttatttttttatttttacttttttttttatgagatggagtcttgctttgttaccaggctggagtgcagtgacacaatctcggctcactgcaacctccgcctcccgggttcaagcaattctcctgcctcagcctcctgagtagctgggactacaggcgcacaccaccaagcccagcagatttttgtatttttggtagagacagggtttcaccatgttggccaggatggtctagatctcttgacctcatgatccacccacctcagcctcccaaagtgcttggattacaggcatgagccactgcacccggcttactcagaatttttgttttctctttctgtttttggggggttttttgagacagattctcactctgtcacccaggctggaatgcagtggcacaatctcagctcactgcagcctctgcctcctgggttcaagcgatttttgtgcctcagccggccaagtagctgggattacagtcatgtgccaccatgcccggctaatttttgtatttttagtagagatggggttctgccatgttgcccaggctggtctcaaacttctggcctcaagcagttcatccgcctcagcctcccaaagtgctgagattacaggtgtgagccgccgcacctggcctgttttctcttttgaatcaaatgggagcctgtttttttcctccaagtattttggggatctctccacgtggatctgcatggatctgcctcatccagcgcctgggtcacgcccccctagcatcgcttaccgtcccagaggatggtaggccttgggccctggggaggagttgtcttgacacaagagtgtctgccctggcagggccatcccgagcctcctcctggccactgaggtctgggaaggacgtcctccgttggtgaagtcccttcctgctccccaaggatggagatccattycctggttcatctggagctctgatcagtaccctgaggccttcccacctgaccccagcttcccctgcaggcactcaccatgcccagagcatttgtccttcaaaagctcatgcctgtcaccaccaggaatgtctgtccttggtctgmtcgtgtggaagcaatcccacaaatccagaacaggtggtgtgttctcccagaccctggcctggactctgccatgagtgaccaccacgggccagtagccctgcggggagcccagccggccccagggcttgggcggctcacctgccccagccaagacgggctgcttctccaggcatgagtcagcatggagctgggagacactgccaccaacaactcgggcccctttcctccatgctagaactgcggaggccccggaaaaatgcttttcaactgccagtgagcttccaggggaggcccgtgccactcaccccagacgatccggaggcctgcaggccacagggttggggccgagcgggagcttccccagggcttctcctcccggaggactggcccatggctcatcttgagttctcgcttcattttgaccaagagcccataaagggcaaacattgagagtgaagacagaygcctcatgatgtgcacatcccttatgatcactgtcacctccccatcaccgtcgcctcctatgtctcgctctcacctcccactcctccctcagatcgttcttgatgttggctgtggctctgggatcctgtcgttttttgccgcccaagctggagcacggaaaatctacgcggtggaggccagcaccatggcccagcacgctgaggtcagtggcccgctggtgcccacccagcctcgtcctcgcccatgagtgccatgccggcccyagcctagagaagcttgggaacccccaggggcctggggacattacttctgtgctttggtctctttattgtccccaagacagtcatttcagggaggggcttcagggcctgagatgattttctctcatggccggtagtcagggccacatgtcatttccctgttttcttttttttttttttgcactgaaaccttcattcacaaagttcaaaacataaaagctaaaaaagagcagacagcgtgctctccttccccaccccagctcccacccccagccccatcatgagagaggagctacggccacaaagtctgagcagagctattccgtgagcgtcctctcgcaccagtggaggctgcaccctccattccctgctctgcctctcccatggatctggggtcgccggggtygtggaggggccatctttgttctgtcttgccgccgcagagcacccctgtgcccagccgtgccgctgttgctttagctgcattgtgtccgcagcgacactcagactccttccaggtcttcacgtggccaacgctgctgtcctgagcccctctcccacatgcggttgtgtctgtaggacacaccctagccctggaatcgctgggttgggggtgcatccagctttagctttggtggctgttgtgatgtctgctcgtccccctctttgcagccaccagcagttgtcgacgcagggtgggggacctaggaggccgcagcaggggacggccctgaggcagggccggggtcacagtgaactctctttttttttggggggggtctcactctgttgctcaggcttgagtgcagtggtgcgatcctggctcattgcaacctccacctcccgggttcaagtgattctcctgtctcaggctcctgaatagctgggatccaccactgcaactggctaatttttgtatttttaggccaggcatggtggctcacacctgtaatcccagcactttgggaggcttaggtgggcggatcacctgaggtcaagagttcgagaccagcctgaccaacgtggcaaaaccccattagccaggcgtggtggtgggtgcctgtagtcccagctactcgggaggctgaggtgggagaatcgctagaacccgggaggcagaggttgcagtgagccgagatggcgccactaccacctccagcctgggcaacagagtgagaatctgtctcaaagaaaaaaaaaatagttttttttttttggtatttttagtagagacagggtttctccatgttggtcaggctagtctcccaacttatgaggtcaagcagtccgcctgcctcggcctcccaaagtgctgggattacaggcatgaggcaccgtgcccggcccacagtgagctcttaacaggctatggccaatcgcagccatggttggggcgccagcgaagcaggcagaggggcacccaatgcccatgtgtggatggaggctgtcccttgagagcaggtctagggagggccccatggcaggaagacgcagggaagcccacatggccctgcccgcctgcaggtcttggtgaagagtaacaacctgacggaccgcatcgtggtcatcccgggcaaggtggaggaggtgtcactccccgagcaggtggacatcatcatctcggagcccatgggctacatgctcttcaacgagcgcawgctggagagctacctccacgccaagaagtacctgaagcccagcggtgagcactggggggtacacaggccrggcccctcggtggaggccctggctgccgctgagccaggccatcagtgcttcagctccctgcttactgtcggtggcccggggtgtagggaagcctgggcttttcccccgctcccaccccaaccccactccagccagctgtggcttttggagccctgggccccaaacacggccagacacccagctgcccactcgcccagacagggtacacaggatctcctggcacctctgcygtcccatgtcctgctcctgcgggacagcctctggctgggagtggggattgggacaggttctgtggtcagcagttccccaacaagccctgctctcctcacagtccaggaggtggggtgggcgagcatgtgtgcaaatgcaggggtgtgggtgcgagtgtacgtgtgtgaggaggtgaggtagctgtctggcaagcccatctgtcacttcccatccgtgcctctgggtatggcctctggtcactgggtgactgtttctttttttgagacagagtttcactcttgttgccaaggctggagtgcagtggtgcgatctcggctcactgcaacctgcacctccccagttcaagcaatttttgtgcttcagcctcctgagtagctgggattacaggtgtgcaccaccacgcccagctaagttttgtatttttagtagagatggggtttcaccrtgttggtcaggctggtcacgaactcctgacctcaggtgatctacccgcctcagcctcccaaagtgttgggattataggcatgagccactgtgcctggcctgggtgactgtttctatttgcccatctgtcttggggtctgtgcagccctgacgcctgaggcatgtgcctgtggctcttctcatgctaggtatgtgagcgtctgagcatttctgtacaggcaagcagctgtgtgtgcgtgtggcagggtacaggtccccagccagggtagcagccatgggatggagcgtgggcagcagcaggctggtggggcttgtgcaggcaggggcaggggggaagcttccactctcatctctggcccgccctggatccaggccctagggtcctggctggctgtgctcctggaggtgggaggtggcgtcccacagctgtgtctcatgtcttgggtgtgagtatgggaagcaaggctgctccaggggctgtgggccccactctcctccccttctgccctgatggtggggatgggggtggggacagccccagcagagagggcccctcccgatgggacatgaagccagatggcagtcaggctctgtgggcagctgcatgtgcccccgacgtcccagcagccagcttgcagggaggggggaggccaggcctgtgcaaggaggactcctgtccagctcaggaagctcttccaggggttaaaggcagccctcccctctcccagtcacatgtcttctggtcagcaggagccagaggttccttccaggctgggtcacttcccatggtgcccccaggtcccccagggcagaagccgcagcatgtgcatctccctccccgttccagcagctgcagccctgcagctctcgcctcgggtacagcctggtggcgtaaggaggaggcagagtcccactgatacctcaggatctcctcccccagcttgcaaggctggggggcccacatctggaggccaggtgctccttggggcaggcggggctgcggggccctgatcctccctgccactggccctgactcatgcgtctacccttgagtcacagagggaggccctgcccttccctcagtctgtgtgcccagaccaggcaggccaagtggcccatcctgccggctgggtgcctgtgccagaacctaggcagtccctgtggtgtggatttggcttcccccacctggctcttggcctcaactgaggtccccagcggcgttggggtagcccggggcccaccaccctccctctgtccagagcaactttgctatgctttcccggctgcacacatgcacagacggcagggcctgagaggcagcgcctggccacatcccgggcactgcctgcttccccgtgagtctttggcaggtccctcacacctgccaggtctagtaataggacataaagatgagccaccagcctcccagtctcaggtggaattcgtgagctggtgcaggtcaggtacccgtggtggtgatgaaacactgatcagaataggcgctcggtgccactgtcacaggagtgcaggaaygaatggatgacaggctgggagcacccagggttgggggtcttggggtcctttggaagctctgccaggcagtgtgggatgtgtcacctgacgccagcacccctccctgccccactcccaggaaacatgtttcctaccattggtgacgtccaccttgcacccttcacggatgaacagctctacatggagcagttcaccaaggccaacttctggtgagtgtgccctgggtgtcccgcctgggccccacagcctgccttctcagggacagccccagctccccagagagcctgcactcctctttttctgaaagacttgggctagatgagggctgactgggagagaaggcagggctaccccacctgcctcttctgcagccctgaccttgctgtgggggtggggcctgtccacaggtaccagccatctttccatggagtggacctgtcggccctccgaggtgccgcggtggatgagtatttccggcagcctgtggtggtgagtagggcctccagggtactgctgcagtgatcacttgccattgctgtgcagctgtgyagccctcaggaagctacagcccctctctgagccctctcctctgccctgcacagcgctctcacagagatttgggccaaaagtgtcaatgcatgtagacacttagcacacagcamacatgcaatacatgtggaacattattaggtgaggctaaggcagagggggcatttaggctcaggagttcaagatcagcctgggcaacayagagacgccatcgctatttttaaaattaaaataaataaataataaaaataaaaaagaaccattactagatgaatttatccttggtgagctgatgtgatttattgattgattttacttgagatttttgatacatagatccatgatttaaaaatcaaaaggaaaaaaaagctaggtgcagtgggtcacacctgtaatcccagcactttgggaggccaaggcgggcagatcacgaggttaggagattgagaccaacacggtgaaaccccatctctactaaaaatacaaaaaattagccagacgtggtggcgggcgcctgtagtcccagctactcaggaggctgaggcaggagaatggcgtgaacccgggaggcagagcttgcagtgagccgagatcgcaccactgcactccagcctgggcgacagagtgagactccgtctcaaaaaaaaagaaaaaaaggttccattttattctgttttccccctgctcttgatgtttttcattcgttttgggagactcttggactatcttggatactatctctttaaacactacgtctgccccattctttctccttctgggattccaattacgtgtacagtgaaccttttcaccatatctcagatgattgttatactcttttctgtcttttccatccatttttttctctcattttctttttctttttttttttttttttgagacggagtcttgctctgttgcccaggctggagtgctgtggcatgatgtcagctcactgcaacctccactttccgggctcaagcgattctcagactcctgagtagctgggagtacaggcgcttgccaccactcccagctagttttttgtaattttagtagagatggggtttcgccatgttggccaggctggtctgaaactcctgaccttaggtgatccgcctgcctcggcctcccaaagtgctgggattacaggcgtgagccaccatgcccagcgtgttcagtcttttgtgatatcactggggagtgaatgagtgaaaaaagcaggaaatattttggtggtattatgcaaattttgtattatgatgagggtgccttggaagaggccacagtttgagaaggtgctgctttatggtacagcctttggtaatgttaatgcaagtccagtggttagcctcattaccaatatgctgctgaaccacccgttagcttttattgttttttgaaacaggatctcactctgttccccaggctggagtacagtggctcaatcacttcatggcttacttcagcctcgatctcccagacgcaagtgatcctcctgcctcagcttcccaagtagctggaactataggagtgtgccaccatgcccggctaatttatttttttgtagatatggggcctcactgtgttactcaggctggtcttgaactcctgacctcaggtgatccgtccgcctcggcctcccaaagtgctgggattataggcataagccactgcacctggcgttgagcctcttattagcggctttctgcttggtgtcttagcctctgatgccctgcctcgctcaaagctcaggagttggccaatttcacaagcgcactgagtgtgcaccgcccacctygccctcctgcacttatttccctttgctttgacatcacagccccttgaatccgagctgccttggtaaccctgagctcccattttgctttccccacccaaggaagctgctgaaaggtcgaggtggccgttttctgccctccccatggggaaaaggtagaggccagaaagggctccctccagaaagggcatttccctcctttccaggagcttgatccccaaaatcctggccgctctggttggtcaccagtgcttccaacaactggtttattcttttctttggattttattcggtttacatagttcatggcaggtgtgttagtcggatataaacattgctgggagtggacagcagcacyagtgttgttgttgtttttaagagacagggtctccctgtgtttcccaggcttgattcacactctcggrcttaagcgatcctcctgcctcagcctcctgagtagctggagttacaggcatacaattccacacccagctagcacctagttctttaacttgcttttttggttaacttgcttaatgatttagcttggagatctttcctcatctgttcataaagagcctcttcattctttctcacgtccgcatggtctttgatgggagagccatcactggtttaattagatggtttccagtgtgtcgctaccacggacaatctaattatacatgtaagtttgttgatgtgttcatgtatctggaggttaaactcctgtagtgccaaatcttttatgtggataaacacttgtcatttggagagctgtcacctgattgccctcggtggcgttgtgccggtcccctcctcacggcgtgtctgggaagagcaagctcgttttagctgcacagcctagaagccgtgggcagacctgggggaaggggcagggctctcccctcccatgctggccctggcgtcagatgccacgtcacacctgtggtctctcccaggacacatttgacatccggatcctgatggccaagtctgtcaagtacacggtgaacttcttagaagccaaagaaggagatttgcacaggtactggcacccacactccatcctcccaggcctggctcaggccgaaggtcagggccacccctggctcccgccggcatcctgccgtcccagggcagatggtgggcgggggccccaggcctctgcacctggcaccccctcttctctctcggcagcgcctgtctggcttccccagcagccactgccctttgccttccaggatagaaatcccattcaaattccacatgctgcattcagggctggtccacggcctggctttctggtttgacgttgctttcatcggctccatgtgagtgccgcagagcagcccrtgctgcctcctccccactcccagggcttcctgcagctgcaacctggctgggggggtggaacatggctccaggttccaccatcccttccaatgggagtgagagcctgtctcggagcaagagactgttgtgggtggggtgtgtgtgtgtgtgtgtatgtgtgtgtgtgtcctgtgttcccagtgtctgtccctcatgggtctgtgtctgtctcttggcacatgtcagggtgagtagggatctcgtggttgcgggcccctcgtgtgtacatgtatgcctgctcatgtttgtgtctgggactgcctgggggccagcctgtctctgctccagggtcccaggggtccctggcagagggggcaggtgcttggggaggactcaaggcatacaaggtggtggctccagtggtggcgccggcccagtcaagtatgtgcctgtccctgctccacagaatgaccgtgtggctgtccacagccccgacagagcccctgacccactggtaccaggtgcggtgcctgttccagtcaccactgttcgccaaggcaggggacacgctctcagggacatgtctgcttattgccaacaaaaggtgcgactgctccctggggctggtggtggtgggcaggggtccatctgcccagcagctcatgccacggcctgcaccctgtccgcagacagagctacgacatcagtattgtggcccaggtggaccagaccggctccaagtccagtaacctcctggatctgaaaaaccccttctttaggtaggaggggccccttgcctgcacaggggggcgccccggscctgcaacccccttgcccctgcccatggctctgtctctgccatagatacacgggcacaacgccctcacccccacccggctcccactacacatctccctcggaaaacatgtggaacacgggcagcacctacaacctcagcagcgggatggccgtggcaggtgagcagggcccaccccaatgcccagccaacccgggaggccgccctcgccrcaggcctggcccctctgcctccagccctgacgtctccytctctggacacagggatgccgaccgcctatgacttgagcagtgttattgccagtggctccagcgtgggccacaacaacctgattcctttaggtgagtgtcccccagggccaggggcagcagggagccrtgcccaggactgcccaggggccgggaagggcctgtggtgaccagggtcggcctctgcttggtcctttcaccttttcctcttcctgggggctctcggccraggctctccgtcctctctgcctcgctctgcagcctgctgctgtgcatgggctgggtggctgggggcggtgacgccgtctcccttccttctttcctccctctcgctgcgcagccaacacggggattgtcaatcacacccactcccggatgggctccataatgagcacggggattgtccaaggtaacgagggtggcgggggcagggcccgtgggggccgagctagcgtgtgagtcgccatcctctgtccggccgcccgcctgccctcttgcctgccctttctctctctctgtgactctgcctgggggctgggcgggccagggcagcccctcactgccattgcctgctccacagggtcctccggcgcccagggcagtggtggtggcagcacgagtgcccactatgcagtcaacagccagttcaccatgggcggccccgccatctccatggcgtcgcccatgtccatcccgaccaacaccatgcactacgggagctaggggcccgccccgcggactgacagcaccaggaaaccaaatgatgtccctgcccgccgcccccgccgggcggctttcccccttgtactggagaagctcgaacacccggtcacagctctctttgctatgggaactgggacacttttttacacgatgttgccgccgtccccaccctaacccccacctcccggccctgagcgtgtgtcgctgccatattttacacaaaatcatgttgtgggagccctcgtcccccctcctgcccgctctaccctgacctgggcttgtcatctgctggaacaggcgccatggggcctgccagccctgcctgccaggtcccttagcacctgtccccctgcctgtctccagtgggaaggtagcctggccaggcggggcctccccttcgacgaccaggcctcggtcacaacggacgtgacatgctgctttttttaattttatttttttatgaaaagaaccagtgtcaatccgcagaccctctgtgaagccaggccggccgggccgagccagcagcccctctccctagactcagaggcgccgcggggaggggtggccccgccgaggcttcaggggccccctccccaccaaagggttcacctcacacttgaatgtacaacccaccccactgtcgggaaggcctccgtcctcggcccctgcctcttgctgctgtcctgtccccgagcccctgcaggtccccccccgcccccccactcaagagttagagcaggtggctgcaggccttgggcccggagggaaggccactgccggccacttggggcagacacagacacctcaaggatctgtcacggaaggcgtcctttttccttgtagctaacgttaggcctgagtagctcccctccatccttgtagacgctccagtccctactactgtgacggcatttccatccctcccctgcccgggaagggaccttgcagggacctctccctccaaaaaaagaaaaaaagaaaaagaaagaaaaaataaatgaggaaacgtgttgcagcacaggcagttttcttctccttctgctcccctgtttctcatacccccaaactcagatgctggagctcaggcccgccgtgtgtgcacccaggcaggagcgggcgctgtccaggctgggccgcccccttggctctccctcctgttccaggggagccataggagggaaagcaggtggcccgggggggatatgggggccccagccctgtcccaaagctccctgctcggctgcccctcgcccgcctttatataaattctctgaatcacctttgcatagaaaataaaagtgtttgctttgtaagaaaagtctggaaagtagcagaatcatctcaaggtgtcaaaggagccttcagtcatcgtctggggggcaggacaggcagaggggttggtccacttaggtgttgcctgaaagaaagaattgtctgggagtggccccagaacctctcgccttgactgggagtgggagggcagcccccttagcccagctgggaatagtccttacctgtgggacccgggccttcctaggagggggccagggactgcggcaaggtaggggacagcgcgatgtttgagggcagagatgtgatttggggtggaggagccacgttctccggaggcagcgactggaagaagtacaactgcacaagacccctggggtcagaggcagggccagcccatgcccccctagcccctcggccccacctgtggccaccccagacccgtaccttacagcccatggccaggagggcgtggagcagcacgaccacggacagcagcactgtggccaccagcctggtgtcctcacggaccacgggccagagggtgaataccagcccggcggctgacaggcccagggccagcgccccaaagagccactgcagccaaggcacagggatgagccacaggacctgggagcaacacggcggcaggtgaccatgccagtccccccagccaccacccactctgcaccaggccaccctcaccaccatgggaatgaggcggcaggtgaccatgccagtgtccccacacagccaccacccactccgcgccaggccacactcaccaccatggggatgaagacaaagagggagtagccgtagatgcacacagtctccaggaaggtgtagggccccatgcgctcctggacacccttgcgccaccgcaggaagccccacagggccaggggcaccagccacgcatagcagtagatgctgatgcctgccacggtcactggggggggcaaggtgagcagtcaccccctgtaccccagggccctgccaggcattgggcctgcccgtctgcttacccttgtggaactgggggctgtagtggatggaggggtccctcctctgggccagcaccagcgtcaggttgccagtgacggccaggacraaggccaaygtggcacagatccagaaggggcctgggggtagggggcacagtcagggtcccgggccctgcactcccaggacaagcagacatgtatcctgactgagctgtgctgagaccccagcctcttcctaagcaccttgcctgactcaccaggacaccgggggcctcctggtggctgagcccagtgctggctgtcagttcatccccctccccgaaacactcaggactgcamacccttggcctgtgtctcacctcattggtgccaattcctcaacccctgtcacctcctctttgactctctgaccccttcagccatggggagcagccaggcccagttcttggccccttccatgtctgcgttcacccatagtatgacctccttcaagcccagggccttatgcctcctctagagcccagggctctgccctgagcactgcaggctccagttcaagctcccgggtgggcatctccggcttcatccacacccttgccctctgccctcactgccaagctggtcccgtggatacgtggcaactctatccatcccgttagtccaggcagaaatccctagagcctgcctccgctcctaacctcccactccccccacccccacctatctagccacaaagccagtctcttctacttccccagcacgttccagaatccagtgccactctccacatccacagtccccaccatgtggccgcctccaccccagcctcctggcttccgccctcgccactcatgatggcgagagggaccccgaaaacacttaaagatccattctcggccagataacagtgactcacacctgtaattccagcacttaggaggccgaggcgggtggatcacctgaggtcaggagtttgagaccagcctggctaacacggtgaaactccgtccctaataaaaatataaaaatcagccgggcatggtggcacgtgcctgtaatcccagccactcaggaggctgaagcaggagaatcgcttgaatgcgggaggggaagattgcagtgagctgagatcacatcactgcactccagcctgggtgacagagtgagactctgtctcaaaaaaaaaaaaaaaagatctcttcttgccacagcatgggaggcttgtgtgatctgtcccctcgcctgtgacctccctgcagctcactcgctccagtggtaatgccgccctgcagttcatgcaagttcctgccatgaagcttacgtcgtttctggaagcctcttttcctaggtctcccccacccctcctgttgccaacaaggctcattccctcaccctcctcagggaggcctgccctgctgcaccctgcagaactgcagggccactcctcctgtctgctctgctgctctctacccgccaccctctgcagtccttcatgtctctgtctccctgaacagcaggtaagtcacactgtctgagtgactgatttgtccgcagctatacactggcatctgcaactcaggccacacttgttgagtgatccatcaaggaaccaaatgcacaacctcactcaccatacagatccggccgattccgcagatggtgccgcacaaagttgtggccaggccgggrcagcagtgagcctttgatccggtccaggacctgggggcaaggccaaggtcaaggatggaagtctgccaggagcttctcccttgtcctgagaggctccttccctgctgacctccacccttctctttccatgccccacctgaaagaactcagcctttccctctctttttttttttttttttttttgagacagagtcttgctctgtcggccaggctggatggagtagtggcatgatctcggctcactgcaacctctgcctcccgagctcaagcaattctcctacctcagccacccgagtagctgggattacaggcgtgtgccaccacgcctggctaatagttgtatttttaatagagacgggatttcaccatgttggccaggctggtctcgaactcctgacctcaggtaatccacccacctcggcctcccaaagtactgggattacaggcgtgagccaccgttcccagccccctcttttttttccctctttttttttttgttttgagacggagtctcgctctgtcacccaggctggagtgcagtggtgccatctcggctcactgcaagctccgcctcctgggttcacaccattctcctgcctcagcctcccaaagagcagggactacaggcgcccaccaccacccccggctaattttttgtatttttagtagagatggggtttcaccgtgttagccaggatggtctcgatctcctgacctcatgatcctcccaccttggcctcccaaagtgctgggattacaggcgtgagccaccgcacccggcctcagcaccccctttttctttttgagacagagtctcactctgttcaggctggagtgcagtggcacgatcttggctcactaccacctccgcctcccaggttcaagtgattctcgagcctcagactcctgagtagctgggactacaggtgtgtgccaccatgcctggctaatttttgtatttttagtagagatggggtttcaccgcgttggccaggctggtctccaactcctgacctcaagtgatccaccgcctcggcatcccaaagtgctaggattacaggcgccgaccactgcacttggctaatttttctattttattttattttttatttaattttattttatttatcttattttatttttgagacagagtctcattctttttgcccaggctggagtgcactggcacgatcttggctcactgcaacctccgcctggcggattcaagcgattctcctgcctcagcctccagagtagctgggattacaggcgcccaccacaaagcccggctaattttgttgtatttttagtagagacggggtttcaccatgtttggccaggctggtctcaaactcctgacctcaggtgatccacccacccaggcctctcaaagtgctgggattacaggcatgagccaccccgcacccggcagtttttgtatttttggtagagacggggtttccccatgttagccaggctggtcttgaactcctcaggttatctgcccacctcggcccccttaagtgctgggattacaggcaggagccactgcgcccagtccatctttggtcttctgcatatgctgttccctgtgcctggaacatatactcctgcttccctaccctattccccagggaagccttctgtctcctttaggtctcagccaattcctcacctcccccaggaggcctttctctaacccaccagattgtgtgtgtcccctgtgttcccatagtcccgatccataaccagtcccaccataaccctttgagagcaccacagttcgttcaccagcacccaccatcaccagcaccctgcccaggggaagagtggctgaaccctgagcataactctgagccccatcccacctgcctccccagcctgacctgtgaggtgtccacgtcaaagaagctctgatagtagctgaaggtccagaatcccggctgctgctgctgctgctgctcctgcaggagctgcacattgcgggcattcagtgcctgcccggagagcctgggtcagctgggggctgcaaggaggcaggacacagggactcaccgcggccttgtcactctcctcctccacctcatcctcggctccatagctgccacctgagcccacggccacagccacgtgcccttgtggggtcagctgatcgcttctgctggtggtggctgcatctggggtgtcagccagaagattagtggcctcctcgaattctgtggaggaggtatatgggacacacgcacgtttgaggggtggaaagaactcgactgggcccaagctaaaccgatgctcatctgggggcggaggctctgctgagccattgatctcccccaaggtggggcccaacttcctcagtttggaggcatccggaggacatctgttcccttcctcctaaagtggaactgcaacttagggttgacsctgggatggggtcagggtctggggacgagaggctcgggtttgaggtctgagttcagggcgggggcggggttcgagtcagagatgggtctcactcctgggtcagggttcacagccgcctaggcttcggggtagagaaattggaagccgtatcggggggaggttctggcccggggcgggagtgggagatccggccacgtcggggccgcactcaccatggaaggtcagctcgtcggccgatgccatggtcgttcaggggcgtctccgcatccctcgctgaggacagagaccggtcaggcacacttcccccccgcccccgagccggtccctcggcccccagccctacctggcgaccaactgcacccacggaggcttgaactcgtcgtcccgtccccacaggtgcgctccgccccccctcacctgaggccacctgggccggcgtggctggggctctctgcgcctgcgcgtctcgcctacccgtcagactccaaccgactcagacctgacagcaacatccggcgcctgtcctctttctatcctctcccgttgggaagccacttccggtaaagttggcgcttgcgcagaagagactcccgggctcttaacgtcgggtatcaggagtttcttcccggagcaaggacccccaagacggaagaggatggccgcggcggctctgaggagattttggtcccggcgccgcgcagaggcgggcgacgcggtagtggcgaagccgggagtgtgggcgcggctgggtgagtagcggcggaaggcggcagggtgggtggccgccgcgacagggtgggtggccgccgcggccggatcactcttaccgcgctcctctcccctcagg

SEQ ID NO: 95468 - DNA, 22268 bp, Homo sapiens
atttggctgtgatcgtctctcagccacataagtgcacttctgagcatatgtagcccaagggggaggtgcatgaatatgcctggagtgcagctttgcctgcacttacggtttgggacacctagaactgaggagatccaactcttgtccagccctcaaaactgggttgaggtgagcaaggaggcagctcagggacaaatttctactcccatctcatctctcttccttagaagcccttggagaccagctcttccaaagtcaaaggtgagaaatctcctttccaacaaaactgtgtggggaagacctgctggtttctacctctaccctctgccccagcatcagctgtccccctgccatggtcacccattcactcctgcccaaggctgagtgggcccctgttctatatcttatcccctgtccctactgctactctgagcctttgctgacctctgccctgcccttgccccagaccccaccccttacagccctggctcaccctcttctctgcccacagccaagaccattgtgatgattcccgactcccagaagctcctgcgatgtgaacttgagtcactcaagagccagttacaggcccagaccaaggtgaaccaccttggccctgcccccagcaacctctgtttctccttgccctcccctccttcctcccaccccaaggctgacctctttcccccaggctttcgagttcctgaaccactcagtgaccatgttggagaaggagagctgcttgcagmaaatcaagattcagcagcttgaaggtgaggactgaccagagatcaaggtcaggctaggccaggcgtggtggctcacgcctgtaatcccagcatttggggaggccaaagaggttggatcacttgaggtcaggagtttgagaccagcctggacaacatggtgaaaccccatatctacttaaaaaaaaaaaaaaaaaaagccaggtgctgtcactcatggctgtaatcccagcactttgggaggctgaggcaggtggatcacctgaggtcaggagttcgagaccagcctggccaatatggtgaaaccccatctctactaacaatacaaaaattagccaggcgtggtggtatgcacctgtagtcccagccactcaggaggctgagaaaggagaattgctttctgggaggcagaggttgcagtgagccgagatcacgccactgcactccagcctgggcaacaaagcaagacttcatctcaaaagaaaaaaagtcaggctggaagctggtcctgttgggatcagctgggccaggccagggtgagggaaattgggagagtctgggttctgggtcaagattaggacaagctgggttcagggtgggatcagggctcagtcaaggtcccacactctctgcagagktgctgagccccacaggccgccagggagagaaggaggagcacaagtggggcatggagcagggccggcaggagctgtatggggccctgacccaaggccttcaggggctggagaagaccctgcgtgacagtgaggagatgcagcgggcccgcaccactcgctgcctgcagctgctggcccaggagatccgggacaggtcggggatggcgggagggcagcttggagtccacaggagggaagggagacccagaactggggaatggaggcaggatgggggaaatggcagatgcctgggggagggggactgagggatggtggaaagcctgagggacaagaagagggaatgaggccgggtgtggtggctcatgcctgtaatcccagcactttgggaagccgagatgggcggatcacctgaggtcaggagttcgagaccagcctggccaacatggtgaaaccccatctctactaaaaatacaagaattagtcaggcatggcggcgggtgcctgtaatcccagctactagggaagctgaagcaggagaatcactggaacccaggaggcagaggttgcagtgagctgagatcgcaccactgcactccagcctgggcgcctgggcgcctgggcggcagagcgagactctgtctaaaaaaaaaaaaatgaggaggggatgagaggctcaggggagacaggtggctggtgggggcgggggagtgggaaactgagaggccagaaggcagggaagacagaaagctggaggtgggatggaaaaggaggccaggggatcagaaagggggatggcagggaagactgagaggacaggagactgggggtatagaaagtcgggggacaggaggtggggaggtggaggccaggtgataggaggctgagtggggtgggagagactgagagaatgggaggctggggatcagaaggagaggagggggatgagggtagggggattgtagaaggggaggggaaaagggcagggaagtgtggggaggggacagagcttgcggggatgggtggaggcacagataggggcatgggaggtcaggggccaggcagggagtgcaggtctaggctgcactgtcccctcagcaagaagttcctgtgggaggagctggaactggtgcgggaggaggtgaccttcatctatcagaagctccgtgagttcctggagcccmcagccggtgtgtggggagggggtccttcttcagcctttgtccgcctgagccccctccctccacagaagcgcaggaggatgagatctcagagaacttggtgaacattcagaaaatgcagaaaacgcaggtgaaatgccgcaaagtgagtggaggagatggggaccctggggaggagtgggagagggagggatggggattttggccagcctccaccatgagattggagcctgggttcaaatctcagctctgccactcactgctgtgtgactgtgggcaagtcacttgacctctctgagcctcagtttcctcatctgtataatggatgtaataataactcatcttggctgggcgcggtggctcacgcctgtaatcccagcactttgggaggctgaggtgggtggatcagaagttcgagaccagcctggccaacatgatgaaaccccgtctatactaaaaatacaaaaattagctgggtgtggtggcaggcacctgtaatcccagctactcaggagactgaggatggagaatggcttgaacctaggaggcagaggttacagcgagccgaaatcgtgccattgcactccaccctgggcgacaagagcaaaactcccatcttaaaaaaaaaaaagaaaaaagaaaaagaaaaagaaaactcatcctgttgggtgctgtggcatgcctgttatctcagcactttgggaggctgaggtggttggattgcttgaggccagaagttcaagaccagcctaggcaacatggcaaaaccctgtctctacaaaaaacaaaaaaaacaagagggtgtggtggcacatgcctgtagacttagctactcagaaggctgaggtagggggatcacttgagccttggaggttcagggtgcgttgagccctgatagtaccattgcactctagcctgggcgacagactgagaccctgtctcaaaaaagaaacaaacaccaaaaacaaaaacaaaaaacaaaacaaaaaaaaacactcctccctacctgatcaggtgtctgtattagctgagtactgtgcacttgaatgcagtctggcatataacaagtgctatataacagtcaccttttactattatcattattattatttattttgttttcttttttgagacggagtttccctcttgttgcccaggctggagtgcaatggcgcgatctcaactcactgcaacctctgcctcctgggttcaagcaattctcctgcctcagcctctcgagtagctgggacaacaggcgcccgccaccacgcccggctaactttttgtatttttagtagagatgcggtttcactgtgttagccaggatggtctcaatctcctgacctcgtgatctgcccgcctcggcctcccaaagtgctgggattacaggtgtgagccaccgcgcctggcactattgtcattattattatgactgctgttctctcatccctccccaccccagatcctgaccaagatgaagcagcagggtcatgagacagccgcctgtccggagactgaagagataccgcagggagccagtggctgctggaaggatgacctccagaaggaactgagtgatatatggtgatgcccagcctgcagtctgacccctgaccctcctctgaacccgttcccccaacgggatctggcagtgaccaccagaacctggagcccacctgagtccagacttccctcaccccctaggactcaccccaccacggcccccaaccttagctgtactgctgtctacaccctgagcagtgtggagtctcccagcgcccccagctccttgtcttcttgcaggtctgctgtgcacgtgctgcagaactccatagacagcctcactttgtgctcgggggcctgtcccaaggcctcgagcctaagaggtgagggaggctgagaattgctcaggggtgggaggtcattgtctagcttcacagggaggctatgttcagagagcctatttgggagtcacatctgatgggtgttattctatggtcacattaagtagtgttctggggtcacattaaggagtcactggaggtttcatccaggagtcattcatggtcacattcagagtcacttggatcttatatgagtccatggggactccacacagtggctcatgcctgtaatcctaatattttgggaggctgaggtgggaggattacttgagtctaggagtttgagaccagcctgggcaacacagtgagaccccatctctccaaaaaatttaaaaactagctgggtgatggtgcacctgtggctgagcacacctgtagtctcagctactcaggaggctgagacaggaggatcgcttgagcctgcgaggttgaggctgcagtgagccataatcgtgccactgcactccagtctgggcaacagagcgagaccccatctctaaaaaaaaaagtgtcaattgggtaaaatgcaagggtcattgaagtcataatttggtgtcacactggatcacattcaagggaattgggggtcatggtttaagtatcaatgaggtatactatgaagggacacagggcctatatttgggggttacttgagggtcacattcagggaacctgtccctcctgcaggccacaaggggcaccagtgcctgagccctccactcccctcctgggactctgactccgactstgaccaggacctctcccagccacctttcagcaagagcggccgctccttcccacccggtgcagatcctccccagtccccccctccacccatttccctcctgacctgcccttgactcccacagtctagaccctcagaacaggcccagatcctgatctgggcatgcggtccctgacctgcagccccggagtcccctggacctggccaggccctgacccaycctctctctccacagcttgagcagccgggactgctctccctgaagacccctccagagagaaaataaactagcccagaccctcctctagccccgactgttagtcttgctgcttcctgtgcctaggaatccccctgccctcctagtttacccctcattgttgggggggaggggtgtagagaccccaggggtcattcgggatgtgtgggcttggaatcaggggacatctgaagccagatttaatatatgacaaggcaaggagtcattctgtccagacacgagcagccagacagacttccacactggccacagagccttcctttctggggggccctggcgaatggggaaactgaggcccagagagggagaggcgcggcccagggacatactctgaagcccctccctcctattaccctcggagccccgcccaccccagggtcctccctctctacttccattcttggttccttcctacaatcgatgctaacacgccccgcctccaagatcacggaggccccgccccacggggctatgcaaatgagacgcccggaggccccgcccctccctccacctcggagtctgcgcggcgcggccaggcccggccgaccgcgtctcggtctycgcgtctgccagcctggctggcagtccgtctgtccatcccgccgcgccggggcagtctaggcggagcgggggctcaggcggcggcggcctcgacgcggtgagaggagggggtgggggcgcccctcatcccctcccgtgggcttcccacccccggtgtcggtctccggttcctgagggttgggtccctctgggtccagcgcggggaggggcgggggaggggaggcggcgagctgggggaggggaccgggctgggggaggggaccccgggccgaggagccagcaccggtggtgagggcggctgtgggtaactgtgattgtgtggttgtcattgtgtgtctgtgtgtggttgtgtaactgtcatcgtgtggctgcatgactgggattgtgtggtttcgggaggtccgcgggtgtgtgtgtgtgtgtgtcactgtcattgtgcggctgtcgttgtgggtgtcactctgatggtttgtgtgtgtgtgtctggctatgctgtgactgccattggccccccgtgtggctgctgtctctgtgtgtgactgtcttggtgttcgtgtggttgtgtgcataggactgtcattgtgtggctsctgttgtgtgttcattctgatggtgtgtatgtgtgtgtggctgtggtcgtgcgctgtgcacctttcttgtgtggcattgtgagtctgtgtcatggtccatggatgtggccatgtggttgtagatggcaccttgtctctcccctgtgactgttggtgtgaataagagactgttagtgtgtgtgtggctgtcgctgagtgccttgtaattgggggtgtgacgctgtgatgagttctgtgacccccattgtgtgcggtgactcttttctgtgactcttaagtgtgttgcaggcctgactgtgtgtccctgactgtagcggtgtgggggcttgtgtgggactgtgatgtgtgtagggtctcctgacatgtctctctctgtttggcctggggtgggggtggggacttgtttgatctgtttggtgtctctgacaggctatgagcccactgtgtgtgagtatgcagtgacatgtgttgtgtgtgttggacacctgtctgaacaagggggcccctcttgtttactgcaaagtggcgcccagcacagcgcctggaagtcggcaggtgctcggtcttcactgtgggatgggtgaacgctatgccatggttgtgkgtgtgtgtgtgtgtgtgtgtgtgtgtgtgtggtgccaggatggaggctgcggctgggttgtgcttcctaagggtgacagcatgggtgactctgggtatctaggacctctggcaaccatcaccccatatcacactgcagagtgagtgtcgtggttggggtgctggacccagagtgcctaccctcgcctgcctgggcctcagtttccacatctgcacaatgggggtgaccatccctgccctgctggctgccaggagcggctgtgagtcttcaggcgtggatgcagcctgggggaagccatagggcgctttcacaggtgagatggggctgggagaatggatgcaagcaggtgtgactgtgttgagccctaaagcgctggggactgggggtagccttgggggagggaagaggagaactgggaggcagaccggctgggaagagggggaaggagggagaggcagttggcagagaaggagggcttggctatcagcccaaccagacaccaacaccacagcccatggggacagagagaggggcccctgcagaggccatggaggaagcgactcaggggaagggtctggtagggatgggggcccctygggaaagaggatggtgtcccctaaaaactagtggggacccttctaagtgccatgggggaggggttcccatsaggctggggagtstcttctaaaggcccacctcctaaagggcattgggtcagagcctcccatgtaggctgtaaaggaagggacccccgtagactcttggggagtggtgtcagaggaggcaggtgtccccagtagggtcaggaccaacagggcaggacctggattgcagaggcatggccagaaggttcaagggacagagtcagggcctccccgggtcttcagggccaggggtgtggccaaaggactcaggggatgaagccagggtcccggtgacctgagccttcccctaggcacaccccctgggactcccactccctccccacctctgcaggcctggccttcaccatggcgggagggagaccgcatctgaagaggagtttctccatcatcccctgctttgtcttcgtggaggtgaggacccccgtacctctcccagagacggcgtgcctatctctgtctctgtccaacctcagtctccttatctgtacccacttttccatctctgggatctcccttgctgtcccctttctcttgagaaatggttatgagcttagattcagaagtgccactccccggggtccaatccctctctgccccatccacactgcagggtgctggacaccacaggtaccctcctgagccacagtttcctcattcataaaatggacatcaccagagtcccaactcatagggctgttctctgtgtgtgtgtgtgtgtgtacgtgtgtgtttgagatagggtctcactctgtcacccaggctggagtgcagtggcataatctcggtttactgccacctccacctcctgggctcaagcaattctcctacctcagcgtcccgagtagctgagactacaggtgtgtgccatcatgcccagctaatttttgtactttttggtagagrtgggatttcaacatgttggccaggatggtctggaactcctgacctcaagcaatcctcctgcctcagcctcccaaagtgctgggattacaggcgtgagccaccacgcccggcctcctagggctgttctaaaggtaaaatatattaattcatggacaaagcttggtacgaccccctgcccacagtgagggttacacctgtggtagctgctagcacccctacttctctgatttctttccatgtgggagagtctctccacctccccctgtctgtctgtctctcatttgagccttggccctaatctcactctccccatgcccatctcttctctccctctctctacaactcccttcccttttcctttcccttctctttcctcttgctttctcctcttctcccctcctttcctggctttcctctctctctgttttttttttttcacttcttccttttctttctttccctccctccctctctctctttctttcttttgtgatggagtcttgctccgctgcccaggctggagtgcagtggcacgatcttggctcactgcaaactccgcctcccgggttcaagtgattctcctgcctcagcctcccgagtagttgggagtacaggcgtctgccaccatacccagctawtttttgtatttttagtagagacagggttttgtcatgttgtccaggctggtctcaaactcctgatctcaggtaatccacctgcctcagcctcccaaagtgctgggattacaagcatgagccacgttttaattttttttctttctttttgtctttcagccattccttttcctttcttttttttctgagacagggtctccctctgtcacccaggctggagtgcagtggtgccatcatggctcactgcagccttaatcctctgggtgaagcaatcttccttcctcagcctcccaagtagctgggactatagttgtacagagataaggtcatgcgatctcaaactcctgagctcaagggatcctcttgcctatgcctcccaaagtgctggaattacaggcacgagccgctgcacacggcccctctgtttctgtctccttctccttctgtttctcctaagccctgacccttctctcacctcctttccccatttctctcagtctctctcccccttgtctctgtctctctccatcttctagtttctgtctctaacccatgtttctccatctctgtatctctgcctctgtggcctcagctggagtcctgacctctctcttctctctccgccacctctccccgccctggcttggtggcagtcggtgctgctgggcattgtgatcctgcttgcttaccgcctggagttcacggacaccttccctgtgcacacccagggattcttctgctatgacagtacctacgccaagccctacccagggcctgaggctgccagccgagtgcctcctgctcttgtctacgcactggtcactgccgggcccaccctcacggtgagacaatgaagacctcctaggaggcaggtgggccggtaagggtgggtgaggggatgggctggaaggccagaagactccatcttggtcttgcccacagatcctgctgggagagctggcgcgtgcctttttccctgcaccaccttcagccgtcccagtcatcggggagagcaccatcgtgtctggggcctgctgccgcttcagccccccagtgcggaggctggtccgcttcctgggtgagagacatggcctggggtcagccccatggtaatggtggggaggtgggtatagaagaaaagagtcatgggcctgacagtcataataattccaggctgggtgtggtggctcacgcctgtaatctcagcactgtgggaggccaagtgggcgatcacctgaggtcaggagttcaggaccagcctggccaacatggcgaaaccctgtctgtactaaaaacaaaaaattagctgggcgtgtggcaggtgcctgtaatccttgaacccgggaggcagaggttgcagtgagccaagattgtgccagcctgggcaacaagagcaaaactccgtctcaaaaaaaaaaaaaaaaagaagaattccagggaaaagctgggcatggtggtacatgcctgtagccccagctacttgggaggctgaggcagagactcagctacttgggattacyagctacttgggagactgaacaagatcccacctctttaaaaaaaagggaattccaggggggaaggaagaggacctggaattgccatgatggggatgttaggaagcaacaagggacttaggctcagaccagatgtaatggaggttctagggacatgggtggggcctaacccaaccatgatggcaactgtcggaagagggtcccagaatgccataaggagagtctcaggcacaaaagagagacacaggcacaggacaaacaccctggggcccctgggtgagactctggctgtgctttaaatggggtcccagcctcaagtagtggctgtgggaaagggggaggggcagaccttacctataatgatggtcccagggcagagggcgggagacccagctctaacttattagtggccccaggaggagagtgttgaactcagtagtagccagtttaggggcaggcaggaagagccccaggtatgccattagggttttccctagccgtcctaggcatggggtggatcctgatgtaatggtgttggggcgggggtccaagcccagctataatggggctccaagggaggatccgcccctgacatagtggtaatcctagaaagacaggggccagataatgagggtccctgggggcaggaggcctcagagtaccttcatggtggtcttaaaggaagggggatgttggcacaactacagggtcccaagtgtgctttaatgacagtcacaggaaaagggagctaagaggcccaatggaatcagtgggagcatcagggcctggcgcatgaaccccttccactatcccacccctaggggtctactccttcggcctcttcaccacgaccatcttcgccaacgcggggcaggtggtgaccggcaatcccacgccacacttcctgtccgtgtgccgccccaactacacggccctgggctgcctgccaccttctccggatcggccaggtcccgaccgctttgtcactgaccagggtgcctgcgctggcagtcccagcctcgtggccgccgcgcgccgcgccttcccctgcaaggatgcggccctctgcgcctacgcggtcacctacacagcggtgagcttcgggagcttcggggtcggaaatgggtgtgcaggctggacagcgaccagcagctaggaagccgccagggttggagcctctgctcttccacgccccgggtgctgttggaagctctcgctccacgccccgacctgttggaagctctccctcctcctcccagatcctagccacgcccccagtcagaggctatcgctgtccattgactccgccccttgccctctggccacgcctcctgagccagtaatgcgagggaaactgttggctctaccctatggcatcaggacagtccctgatgtgcaagactcggaacccctatagcctagccaggcccccaggatgctacaggcgctagatattagctggcagactgggcagatgggacggccccctggagtccttgcccctcttctggagcccttgcccctctcctgggggccttgttccctcctgttgtagccctggccacgccccttgctcttaactgctctgggatttctaactctgtcccctgctttttcctggtcacatcccctgttgcttcaactcttttttctggcatccgggtttatgctcccaccctgtcagtggtcccctaggggtcaggggctccacctcctacagctcctacagctcctacagctcccttcgccctgactccaccctctggttctgtggccacgccctaatccagtaagtgtctgtccccatctgcgactccggaccagggacacctgggccccagaccttgtcctctgctcttgggagctctggccacacctagccctgcaggtggtgcccacgagactccaagacctcaatccctgaccccccyccctttgcctttttggtcacgctccctggaaaagcccactgggagcccatgactccaaccctggagcccctggccactccctccagccccaacgctctggccatgcgctctagcccagaaaggagcgtccacttgggttcggcgacttgcctccgctatccccctgaccagtccggctccccgcagatgtacgtgactctcgtgttccgcgtgaagggctcccgcctggtcaaaccctcgctctgcctggccttgctgtgcccggccttcctggtgggcgtggtccgcgtggccgagtaccgaaaccactggtcggacgtgctggctggcttcctgacaggggcggccatcgccasctttttggtgagttgcctcctcaaccttcccagcatggaagaccctcaccagctctytgacccaagaggcaggaccacatgatggagaagggtgtggactctgtgtgaccttgggccaatcccttaacattacccttcctggatattctcatctgtgaaatgagataccaggatcagggtgaggcaaggccttgaatgcaaattttaagagggtgcccaacactcagtaatcaagattaatattttaacaaaacatttttaaaaatcaaagttaatacaaaactatcataatgtacagaatataaaaattctaaataaagatgaatcaaggctgggtgcggtggctcacgcctgtaatcccagcactttgggaagctgaggcaggcggatcacttgaggccaagagttcgagaccagcctggtcaacatggccaaaccctgtccctgctaaaaatacaaaaattagccaggcatagtagtcccagctacttgggaggctgaggcagaagaatcgcttgaacccgggggacggaggttgcagtgaactgagatcgtgccacctcactccagcctgggtgaaagagcgaaagtctgtctcaaaaaaaaaaaaaaaaaaaattagctgggaatggtggtgcacacctgtggtcccagctactcaggaggctgaggcaagagagttgcttgaatccaggaggtggagtttgcagtgagctgagattgcaccactgcactccagcctgggtgacagagtgagactgtctcaaaaaaataaaaaattaaaaaaattaaatcctgccactgtacaacttggtcttacttactttagcctagtgtggggtctgtgggataaataataattgcacctacctcagtaaaatggaaccaacagtgcctggcacatactatgcattagctgtttttgaaaaccggagcctcactttccttatctgaaaaatggggatggtatttacatrgctcctatgtgacttgccccaggcctcaacactctcctctccctctattccaggtcacctgcgttgtgcataactttcagagccggccaccctctggccgaaggctctctccctgggaggacctgggccaagcccccaccatggatagccccctcgaaaagttaagtgtggcgcaggtaaggggggccgggggctgctcccggctggagagggtggtgggtggagggggccaaggagacaggaaggaagtcaggcaagaggtgggggtctcagaaccatggggaagtggagggatcacccatctctgtggacataggtcctgggcggacagccccaaagaatgaaagggagcacccccgtcttcttcccagggggacayggttaatcatgagaactgtggttgtcttttccatggggctcttcacctgatgagctccttgtggctgtggccggtagggcccagggggccactagccccttccgtctgtctctttgtctcaggaacccgaggtctgcaggccgcattcgacaccggcacggctcaccccatccagtgagtgttgggggagtggggggctaaacagggggacttccaggtgggcagccactgccccagaggtctcacctaggcctttatgctgcctcccgagttttctgatcccctgatatctggcttctgaccaccagagtcgcagaactgcgcccgccgtggccacctgatccccagctgtgtctcctccagggccccagccatgtgttcgtcgccccgtgtgccccgtcctcgattgaggtctgagccgacgcccttgcccctgcccctacccctgccagcgcccacccccagccagggcccctcgccttcctcccctggacctggggggccaggcgggggtggtggacgtggccggaagctgctgctgcccacgcccctgctgcgggacctgtacaccctgagtggactctatccctcccccttccaccgggacaacttcagcccttacctgtttgccagccgtgaccacctgctgtgaggcccgaccacccacccagaatctgcccagtccccacttcttccctgccacgcgtgtgtgtgcgtgtgccacgtgagtgccaaagtcccctgccccccaagccagccagacccagacattagaagatggctagaaggacatttaggagacatctgcctctctggccctctgagatatcccgatgggcacaaatggaaggtgcgcacttgcccctactattgcccttttaagggccaaagcttgaccccattggccattgcctggctaatgagaacccctggttctcagaattttaaccaaaaggagttggctccaaccaatgggagccttcccctcacttcttagaatcctcctgcaagagggcaactccagccagtgttcagcgactgaacagccaataggagcccttggtttccagaatttctagagtgggtgggcatgattccagtcaatgggggaccgcccgtgtctaagcatgtgcaaaggagaggagggagatgaggtcattgtttgtcattgagtcttctctcagaatcagcgagcccagctgtagggtggggggcaggctcccccatggcagggtccttggggtaccccttttcctctcagcccctccctgtgtgcggcctctccacctctcacccactctctcctaatcccctacttaagtagggcttgccccacttcagaggttttggggttcagggtgctgtgtctccccttgcctgtgcccaggtcatcccaaacccttctgttatttattagggctgtgggaagggtttttcttctttttcttggaacctgcccctgttyttcacactgccccccatgcctcagcctcatacagatgtgccatcatggggggcatgggtggagcagaggggctccctcaccccgggcaggcaaaggcagtgggtagaggaggcactgcccccctttcctgccccctcctcatctttaataaagacctggcttctcatctttaataaagacctgtttgtaacagaagtttggccatctgccttcctcccccgggtggtgggggggtgcggaggacattcatcgtgggtctagatgtctgtggagctgggtgtgggtgtgttgccgcagtgtatctaaggacaattgtggaaaggcagcccggtttcatggagcttcagacttgggctgaaatcctggctcagcattctgggctctgtggcctcagaaaagttcattcacctctctgtgcccttgtttcttcatctatcaaaggcaaacagtcactcaagctaccaaggcacacaaacccacatcaggagccgtacatgccctgtgtgtctcaggccagggcacagagggcacaaggaatggggtgaggatacttgggggtcctgagagggatgggggatgctgaggggcactaagaacctccaagyggaacacctggctgtgtggatgagaacaggggtgctgagtatgagattacaccaagacccaacccccctgagaactcagcagatactggggatgttcaaagggtcagggagagggagccacaggacccctccctcaattgtggctctgagggctttcagacagggcatttgggacccagagtcactcaggaaccaggaaaagggagtctgtttcccttctctccttaattaattcactcattcattaagcaaacactgtagaacccctactgtgtgctagatggtcttagtctgttccagctgccgtgacaaaataccatggacaggatggcttatttattaaattattaaaaaataaatttctctactactattaaattcctctactaattattaaaaaataaatttcttggctgggcatcgtggctcacgcctgtaatcccagcactttgggaggccgacaagggtggatcacgaggtcaggagattgagaccatcctggctcacagggtgaaacctcgtctctactaaaaatacaaaaaattagctgggtgtggtggcgggcgcctgtagtcccagctactcaggagactgaggcaggggaatggtatgaacccgggaggtggagcttgcagtgagccgagatcgtgccactgcactccagcctgggggacatagcaagactctgtctcaaaaaaaaaataataataataataacaataaatttctgatttatttatttatttattttgagacggagtctcgctctgttacctgggctggagtgcagtggtgcgacctcggctcaccgcaacctccaccttccaggttcaagcgattctcctgcctcactcagcctcctgagtagctgggactacaggtgcgcaccaccacgcccagctaattttttgtatttttagtagagacggggtttcaccgtgttagccaggatggtctcgatctcctgaccttgtgatctgcctgcctcagcctcccaaagtgctgggattacaggcatgagccactgcgcctgccttatttttattgtgtgtgtgtgtctttttttgttaagatggagttttgctctgtcgccaggctggagtgcaatggcacgatctcggctcactgcaacctctgcctcctgggttcaagcgattctcctgcctcagcctcccaagtagctgggattacaggcacccaccaccacgcccggcaaatttttgtattttcagtagagatggggtttcaccgtattggccagggtggtctcgaactcctgaccttgtgatctgcctgcctcagcctcccaaagtgctgggattataggcatgagccgctatacctggcctatttttttaatagagacagggttgtgccatgttcctcgggctggtcttgaactcctgggctcaagtggttcacccaccccagcctcccaaagtgctgggattacagacatgagctaccacccctggcctaacagaagtttattgctcacagttttgaaggctgggaagtccaagatcaaggccccagcagattcggtggccagtgagggcctgcttcctcatagactcactctagtctcacatggcagaaggtggagaagctctctggggcctcttttataagagcactaatcccattcatgaggactccacccttatgacctaatcacctytaaaaggcccccacctcctatcactgtgggttaggatttcaacatatgaaccgggggaaggggcacaaacattcagaccaaagcacaggtgctgtttagttaggcacagggtgggggttgtggcagggggaggttacagcagtaaacaacagacacaaacctctgctgtcacrgatgtgagcgttctaatatgtaagacaacaaacaaggtaaatggggcctggtctccacacctgtaatcccaatactttgggaggccaaggccagaggattgcttgagcttaggagttggagaatgacctgggcaacatagtgagacccccgtctgttcaaatatatatatatatatatattttaaaattagctgggcatgttggtgcgtacctgtagtcccggctatgcaggaggctgagatgggagtcccttgagcccaggaagtcgagactgtcgtgagctgtgatgatgccactgcactgtagcctgggtgacagagcaagaccatgtctctggataaataaatacacaaattaataaatataaaaataaacgagctatatacagattcacaattccaaatttttatagaagtctgaaaaccaggccaggcgcagttgctcacacctgtaatcccagcattttgggatgctgaagtgggcggatcacctgaggtcgggaattcaagaccagcctggccaacatggtgaaaccctgtctctactaaaaatacaaaaattagctaggtgtggtgacacacgtctgtaatcccagctactagggaggctgaagcaggagaatcgcttgaacccgggagttagaggttgcagtgagctgagatcacaccaccgcactccagcctgggtgacagagtgagactctgtctcaaaaaagaaaaagaagtctgaaaaccaaaatcctttcataactcatttatggcaaaacctaacctgaactgacctgagattatatatagcttttatttatttcacttgatgtgaatattcttgtgttttgctgaagataaagtgacttgaggattttactcctggtcccaccaggggtatgaaatacatagtatttataccctattacttttttaaaatctgaaaaatcctgaatttccaactccaggatcatggatttagctaagggatctctgatatgttagatatcgatatgtgataaggagaacactcaagctaaggaagccgatgtgacaagtgtgggatagggacatggtttgcaatttttttaagagagagggagggtctcgctctgtttgttgcttaggctgagcgacgagtggaatgcagtggcatgatcatagctcactacagccttaaacttctgggatccagcgatccagtgatcctcccaagtagctgggactacaggcacacaccaccatgcctgctaattttttaaatttttagtaaagacaatgtcttactatattccccaggctggtcttcaacttcagggctcaagcgatcttcccacttcggcctcccaaaatgctgggattaaaggggtgagctgccatgcctgggctatggtttgcaatttttaaaaaagtgatcaaggaagttttctctgagatgacactgggagggagggagccatgcaaatatgtggtggggagacctctaggcaaagggaagagcaagtgcgaaagccttgaggtgggaacatgccttctgtgttcagggaacagcaaagtggcctgtgtagtagttggcacagggtgagcaaggaggagacagaagaaaaggaggctggggagacggtggggaagttgaggagatggtggagctgatcatgggccactggggggatgagatgagagcatcagatagctgatggcagaggaaagacagcatcatgaggccccctgattgactgaccaaggctcctgtttccagagcttatacacctgagacccgtggtctctcctgacacacagctgtctccactggggccaggaagaaagcaaagcttcagcacaacggacagcgccaccacccaaaccagcaggccctgtctgtgatgctgacgcagagcgctggccaacaatgggaatagtgggggaagaatcaggtcccattcaggagggtggtgacagcagccctggccttgcaccaacccccatactgggatagatgatcttagagaacacaggctggcttgtacctgtttgggattggctgggcgtggtggctcacgcctgtaatcccagcactttgggaggccgagccaggcggatcacttgaggtcaggggtttgagaccagcctggctaacatagtgaaacaccattactactaaaaatacaaaaaattagctgagcgtggtggtatgcgcctgtaatcccagctactcaggaggctgaggcaggagaatcgcttgaacccaggaggcagaggttgcagtgagcagagatcatgccattgcgctccagcttgggcaacaaaagcgaaactccagctcaaaaaaaaaaaaaaaaatgaaagccttctcagctgggcacaagtggctcactcctgtaatcccaacactatgggaggtctaggtaggaggattgcttgaacccaggagtttgagatcagcctaggcaatgtagcaagaccctgctctctaaaaagtaaagcgtttaggcctggagcagtggctcacgcctgtaatcccagcactcagagaggctgaggtggcagatcacctgaggtcaggagttcaagaccagattggccaacatagtgaaaccccatctctactacaattacaaaaattagccaggagtggcagcatgcgcctgtaatcccagctactcaggaggctgaggcaggaaaatcacttgaacccgggaggcggaggttgcagtgagtccagatcgcaccattgcactccagcctgggtgacagtgcgagactcggtctcaaaaaataaaaaaacgacaacaacgacaacaaaaatcaaaagccttctcaacatgcccctgtgggtctcacagcatctcaatctcaagttgactaaaacagagctctctgatttagaatgtcacaacacaactatcccaggcacagagctctctcctgtctcctcatgactcgagtaaaagccaactttctcccaatgcctcagggcccttgcactgaatgaattctccacctagaatgttcttcccctgcatatttgcacagttcacaccctgacctctctcaggccttttctcaaatgtcgccttcccagcctgacccaaccaccctattcaaaattgaaaaaacaactggcccttccttctaacttcccttccttgtgcaaatttcttttctttttttttcttttgagatggagtcttgctctgtcacccaggctggaatgcaatggtgcgatctcagctcactgcaacctccacctcctgggttcaagtgattctcctgcctcagcctcctgagtagctgtgattacaggcgccccaccccgcccagctaatttgtgtatttttagtagagatggggtttcaccatgttggtcaggctggcctcaaactcccgacatcaggtgatccgcccgcctcagcctcccaaagtgcttggattacaggggtgagtcgccgtgcccggtcccttgtgcaaatgtctttttgcctatgcttgtcatgtgctcacagtgtttcaattcctcgtgatgctcagtgggtctttataggtctccctcactcggatgtcgctccaccaggacagagatttgatctgttgtctgttcactgtggggtctacagttactagaatgggccctgatacatagtagatactattgcttgaggatgccagtaaactaaggataggcacagagtgaccccaagccacctagttcctaccctgtagccccaggtccaaccctacctgcaggcaggta

SEQ ID NO: 95469 - DNA, 37977 bp, Homo sapiens
ccctgagactaccatgctgtgaggaaatccaagctagccaggtggagagaaggtgctccagcagcctccagttgttcccgccattccagcccaggcaccagataggaaactgaagaagctatcagcaattcaacctccaaccatctgacttcaactagatgaagaaccacaaatgagatgcaccagctaagcctgtcagcccctggacccatgagagataataatcaattgccactttaagccactaagttctggtgtggctagttacaaagcagtaggtaactagaacatcacttccctccaaaaaaatcgttttatgatttaatatttaaagcagtatttaatctgtaaattaaaagggcaaattgctttatttcaaaactgtaaaacaactttattttgggttatgaaataaattagtatgcaaacctaaggaaaatgtttctatgaatagactgagtacatgtgtctgtgagaaaatcaattaaactgagaaatgtaaaaacaaatttgcaattaggggaaaaagtacaagagaataatgttagcaatttaaacaaggatgtttgcgtccagctttgttgaataactcaaaagggatatttttaaatgttgatttcataatctgtcaaaaatgttaaccatctaacaaatggatagcatcactgttatatgctaagcttttgtttcctttatgttcttttatggaaagaaaataaaaatttacttctgcattctataaacaataaaaaaacgtatttcaatcctgaaaacatgataattactaaacctttgtcttagtcatactgggctgctataccaaaataccttagactagataatttataaacaacagaaatttactgctcacagttctggatgttagaaagtctcagatcaagacatcagcagattcagtgtcggttaagggcttctgttataagagtgcttatcccattcatgagggatccactatcatcacttcatcacttctaaaaggccccacctcttaacaccaacacattagagattaaatttccacatatgaattttggagagacacaaatacccagaccatagtaacctttcatgaattctaaagccacttgtgtgcctacgatttgcaagtattagagctaggatatgactcagctcctgcctttcagaaacttacttatattcaaaattgcaatgcaatgttaggtgccacaatagaggtgtggctgtacaagggctaaaggtgcactgaagagtgcttagctttatctaagcagttcaaaaagtttccttggggaatgtgcatttgagctgggaactgaaaaacatgkaagtttgtaaggtaaattgtgcatggtgagaagtgtgttgtgggataggcaaaaggaacagcatgtgcaaaatcatgatggtataagagcatggggtgtttagattataattaggagggaagtagcttgatacagcttcagcataggatggaattatgagggagctgtagctcatgaacctggagggataacttggtaataatgtcatcttcattcatagtgcctggcacatagcaagtgtttcttaacagtaatattttgagcatgtgtgtgtacagatgcagccatgggctgcattacaatgttttggtcaataacttattatatacactacagtggtcccataagattgtaatactgcatgtttactctaccttttctgtatttagctgtgtttagatacacaaacaccattgtgtaacagttgccaagagtatttagtacagtaacatgctgtacaggtttatagcctaggagcaacagactataccatgtagcctaggtgggtagaaggctataccatctaggtttgtgtaagtataccctgtgatattcccatagtgacagaatcagctatcaatgcatttctcagaacacatccctgtcataaagcaactcatgactgtagatagatagatagatagatagatagatagatagatagatagatagatccatttatctgtctattgagagagagagctggagggaggacatgggaaaaagaaaatggaatttctaaattgttttcatatagggaggcaaacagaaagggaaatttggggtgacttgtggatataatggtccttgcaataaggccaagatggcatatctgcggggatttctacctaacagctgattcttcataaccaaggaagctgtcctagttctcagcctaaaaagataatgatataatatctagagctactgacttttggaggatacataaaaccccaattttcttctaaattcttagtttcctttagcaaaatcccagccatggttataatggtaatctcagaattttttagttgcctcattgtctatgaaatagtttattttacttcactctccatgtttacaaataattatagaagcatgtttaagctatgctggggaatgtgtaagtgactaggaggcattttagaaatgacctaaagaaatagttggcattattgagaaaaggatcatgaaagcataggtagtctcactagcaaaatactaatcttacaccaaaggagatttataagcattaaccaaaacagttagtgaactggccttttgtcagttttcatacatgccaatgattaacagatagccagagttcattttgtttctaataagctatcaatggaactttaaaaattatgaataaactgacaaactgtggctcaacaaatatgtagaatgttaagaaacttaacagtactgtaattgagcaaaaggtgataaaagaataggagtcactttgaacaggaaaaaatctatagttttagttctcatgctaacaaaaataacaataatggctaacacaaaagtctagctctgtacaatcacacactaactcttgatttttttgaatgtgtgatgaaaaagaaatatagcttttaggatttaagaattaaaaaaaaaaagtaaatggaattgaggccagatgcagctgggtgcaacrgctcatgcctataatcccagcactttgggaggctgaagtgggaggatcacttgagctcaagagttcaagaccagcctgggcaacatagcaagatcccatttctactaaaaatacaaaaattagctgggcatgctagcacacgcctgtagtgccagctactcaggaggctgaggcagtaggatcacttgagcccaggagtttgaggttgtagtgaactatgattgcgccattgcactccagcctgggtgacagagtaagaccctatcttaaataaataaataaataaaattgaaatatgtgaaatttggacatttgctaatatgaatgtgagactgaaaggcttgtctgtacttgttgtattgtactctgcagttagaacttaagataacaaagtcaagatggaacagtggcacagggctataagtttccggtacttggttcagttcccatgatccaaagtctggtcctcagagtacacattcagaaactcaattctgtaaggtgagtatcatgctcagagatggtaagtctttgggaaaatgtatcatctcagctacactcaccagagactaaagcatttttaacctaagttctgatttattaaataacaatggagcctattattttccaaaatgtcactagataagaatagaatcaaaataaagggaattttgaaaaatgtttatctaggccagtggttcttaactaggggcaattttgcagccctcctctacaccaacccctccttccatggacatttggcaatgtctagagacgttttgggtatctaagcttgttaggggtaccactggcatctagctagtggaggccagggatgttacgaaacatcctacaatgcacagggtaggcctccacgacaaagaatcatctggccccaaatgtcaacagtgccgaggttgagaaaccctgttctagtctgtggaaaagccacaaggacacttctcaagtagcatatttgatacccaagagattatattattttctatgtatggtgtcttttctagtctctctaaaactatctttgctatggattgaatgtttgtgttccccagaattcaaacattgaaccctaaatccttaacgtgatggtatttggagatggagactttggaagataattacaccatgatggtggagtccatgtgaatgggactagtgcccttacaataagatgaaggaaccagagctctcctcaccccacccaccaagtgagactacagcaagaaggtattcctctgcaaacgaggaaaagggctctcagcaggaacagatttcatcagcaccttgatcttggacttcccagacttttagaatggtgaggaataaatttctgttaagctggaactgactaaaacaatctcttttcttacaggcttcaagtatatttgactttttctcatttttattgcatccctttattgcctccttaagattatattcctactcattttagttcaaaccaagagtcctatatcctctcagccacacatttacacataatttttggactatttctttgtgtacttaatattcatccatttttattggtagtgccattttttaaaatgtcaaccttaatttctgatttcagccttctttgcttccatgtccaaataataatgataattatatatattcttaatatttttaagcaatcgacttttgtggatctattaacattttatttatgctgggtaaaagaaattttagttctgcttattctcacattgtattcacacaagaaccctttagtaaagaacttcacacttacagttctttggctagtctgcacctcacagcagtccacttattaggcaaatatatcatttaatcaattatttctctttgttcaaacatcagttataaagaacttgcaatttaggtatttattctgtttcagttttgaaactgaagaaaatccccttttcaatgatttatacttaaagatagtaaaaagaaagtttaaaacaatttacttcaatgctttctcaaaataaaaacattattttgatgaaacattattttcagtctaagttccaattgatccacaggttcagtccacaggttaatttagtccaaagatcactatggcaaaatgggcctgagccacacaatagattctggcaggtaatctcttgtgtggcagctcatccatacttaagtcagctcccatagctacacaatttgcagggcccaattccagacacaaacgtggggccctggttcaacacttactgagagaaaatgtagcgtccttctgttctgggggccgggtaatagcacaggttgcaggcccatgaggccagccccaactatcagattgtgtatttacaatgtcagtctaaccgttgctgaaaaatacttagctctgttgtaatcagatttaatttctcaagaggcaaagtacactcaacagtttgcttaaatcagagagaccaaaaggaaagatttgctgtaaattatcaactagcaaatcttagtcagttcaacttaatttttattgagggaagaagggagaaaacagaaaactgatggagttcccactgcgtgtcggccactggagatttcaaaggtttcttgtttaactcaagctaccaagtaggtgacgtggatagtcttgggacagaggagttgggggagttgaaattaggccctagtttctacaggaaaccctctgcacgagttaagcgaagctacatctcaagtttattaatgcctcgggttcttgctgctggctctgggaagagtctgagcacgcacagcagactgatccccgacaaggtgacagggactaacctaacgccctcctcgttggtcctagtaaccacacagagcagaaacgcgggcgaaggcaggagttggagggggcgcccacgcggaggctgccgggaagtgcaatgtgcaaaggcggcggggacatggagactgaactggagaagagcgggttctcggagttaaaagcgagagtgagtgggaccggaggggcggggcatcatatgggcggggctgaggcgaggccccggcggccatcttgagccccgccttttacttcggcccgcttcttctrgtcactccgccaccgtaggtaagactgggttcgggtagaggcctggacgttgtcagccttcctgcggctgcggcacggctaggcgtgatcggggcggacgccgagtcctgcggtgcaggtatccgcaggcacgagcgcagagacggcgaccctgggccttgggcgccaccatccatgacaggaggccaaggaccttttcccgtgacccggagcctcgcctctaatcccttttccttctctgagcctccaacctagtgtaacccggggcgakcgcccgtttacctactgcccgctacatttgtacagctttttcctgttcagaaagactttcctagacccgcagccaccgcgcgaaaatgtgaagtagatgtgtacgcattttaaggagggagctggcctcaacgcgttactagcggccgccggcgcctggttcgggggagtgtggacctgctgctctaggcagcgtccgcgtcggggcacgagccaatggcgcggtcaggagcactcacctgatggtgccgaggggagcacgtgtctttggagtttgacaaaatctgttcgggtcgtaaaatgctctcagagcgctgtgggggactggaagtcatttctgatggggtcatyagggaaatgggattgagcgcacctggaaggagagggcattcaggttgcaggaaaaataatagctcatgtttgtgtgtgtggtagaagcagcattytaagcactacgtgaattaactcatttaattcccagagcaaccctatcaaattgatatatattactgtatacccattttgcagatgggcaaatgaggcatagattagcttgcccagtgtcatgtagtaataagtggtgaagtcagggtttgaacccggagggtctggccccaaaacctgctctgaaaccattgtaccgtggcattgagtaaagccacccgatagcaacatccaggccatcctagaattatgcatagttgagtttaactaacaaaatagggagtgagaccagaaaaataatctgggaccaaattatagaccatatttagagccatgtgaaggtgtttggcgtttatagatgctatattttttwwaaaaaattttccccagagtttaatagaaatccttacctaggcaagccatgtgaatttttatgaaggaaaagagacccagcctaggcagcatggcaaaacctcctctacaaaaaattacctgggcatggtggtgccacctgtggtcccaactactccagaggctgaggcgggaggatcacctgagcccgggggccgagatgattgcagtgagccgagatcaggccactgcactccaatctgggccacagagtttgaccctgtctcaaaaaaaaaaaaaagaagaaaaaaaagactgtgtttgcacacaggtagagtgtgactgaagtttatatggagttttattcatctattttttcagtgatcctgcatggttttaattttatgaaattttaatggcattaaacttgaagaaaattgtacaattaacatggtcttccatttcagtgactttctggttctcagcgactggcctaacagcgaaagggattagtagtctccacctgcagcagccagggggtgatgaggcagttctcatctgctcattattgtgagctggcgaactgcgtttttacatatgactaatggatacttaacactactgaaatacacacttaggaatggttaagatagtaaatattatgtatgtgtttttatcacagtttttaaaatactaaataaaaatgactaacaattccacgtaggccgtattaggctgcagatgagctgttggtagggatccgttgaccagtaaattaagtggattaaaaccctaggctttcatgcaggattgatcgtagtgggatgtattaggaagaaaggaagaggctaagttttaatttcttatatataattaggatgatggcagtgggaattcaaaaagaaggtaactttgaggcatctcaaatgtagattaggcaagacaggcatgagtctgaaaaagagaggcaatgaaaagaggaatggtttgaaggtgagatgcagaagcttaattttaggtgtggtaagttttaatagctggtgacatgtcttggtagaagagtccagcaagaaatgtcattatgggtactaatgcttgagaaagattggttatagagatgcagatttagattatttcacccagaaaatgtagttgaaatttagggaatgaggtttagggaaagagtgtgaagaaaaaagaaaagggaggtgggaggagacagagtgaaagggaagaagccagatcctgagttttcactgagaagaggatttgaacaacacagtggtggtcaacagcagttattggaactgtagattgttggttttgggaacacctgtctaggttgttaagagccagtggaataggacatcctggaaatgaagaaacatcaaaatccaaggaatctgagagaatgggaacaaaaaaacacatgtagagatttatggaaaacttgagacacaggggaagaaggataaaaatagaactcagatttctggaggtggatgacatttaactttaataagtaaagggccctgtctctacaaaaaattaaaaaaaaaaatattccagtgtggtacgcacctgtagtcctagctgctcaggaggctgaggtaggagaacacttgaagcttggagttctaggttacactgagtcatgattatgcaactgtactacaacctgggccacacagccaagaccccatctccaaaaaataaaaaataaagggaagaacagtaaggtttgacctttaggggaatggatgtattatgcactgagagaccctttcttctccaaagaatgttgatgttcactaacatttgggaaaaattgtgtaactcccactggcactgtgaaattgtttttctgtttttgttgttgttgttgttgttgttgtttttttttttggaggggaaggaggaagggtgttgtttggttttttggtattccaccctactctgtcaccctatttctcccacaaaatctgttctagaacctaaatatatatttgttctagagcctaaatgaaatctaccagataagtgacatgatatatactatgtaagtttccatatatatttttcttactgaatatcagtcacttcatcgttcataagcccacttttcttatwcatcctttctagtcaccctagtagtagtccttcagtcctcatctcttcccttctttctccccatgttacaagttcgacttacaactgagccagatagatccatcttcctctacttacctagtccccactcttattttcttcactcaggagttgactacatctcatgcttcgaaattacacttgaaaactttgtttattgatttaaaaagataaaaaactttcatagtacttttacttcagcagatggttttgaccaagtaccaacaagctttatggcaaaataggtattaaggtggcctgtggcaaataattagattatgggcaattaaggtaattaagtggtgatgtggtatcccatcagggtgtacagtcatttacctcaaaagaagaaaacatctctattgagaatgcatatgcatataaaagctctgtataacctttgctgtgaaaagtatatcccatttgtaaaccattggtgtttttttcagaatcgcctaccatttggtgcaagcaaaaagcaatcagcaattggacaggtaaacttgttttattgtttatatgttactctgaacattgaatgaaaataccactaatagcttgttttaaaacgtgctatttttcacatagaaaaattctattgaaaaatataaccacctattataatgtatcagatatcatagtatatcacagtatgtcatatctagttcttagtttatgtcatatttcttgttaagcctaacatatttttttgatttgtaattaaagatagtttctaaaatggtgggtagaaaaaatactttaaaagctttgttttttaaaaaatattctaccaacttttaaaaagtgttttaatcttgtttcttctggccaaatgaaaagcatttgattttgaattttaagagcagagaaaactgacaacttgaggtttattaaaatagacgaatagcaaagatacagactcctatgtaccagatacgtgctcagtgtaccatcttttgcaaagtggatatagtcctttctaagtttaagaaaatctggtttccttgtggaataatggagcaaataaattttatttgttggtctcatatatatgtattaatatattaaaattagtatctctctctrtaagttcattatttaagataggattgttaacagtagctaaagttaatattcagtaactaataacatctcatgggagtttattgtttaagaattaatcttttatagattaaaagcataaaactgagcagatggtaatttctttgtgtacagttgtaatatcataattctatagaatcagttatcttaaagtgtcttaaaaaatgagtatttaaagaacctctagagagtcaggacagcatagcagttaagagtagggcttctgatgtcagacttctgggttcaaatcccagtcttccaaaataaaactatttgggtttattgaagaaattagagataagattgaaactaattttttaaagtattttataaagacatttccaaaattagctttttaagattattgttatacatctttgaaagagtaatcctaaagctccagctgattagcatgtagtagtgcatttctctgagaagatcaccagggtggtaatacctgttcctgatatctaaagctttttcttcaatatgtaggacttactgccttatattctaatacagtgtttctaggaatagaaagggaatctttctttgagaggtacatgtcagaatcagtgtggtttccctttgcttaataggcatttatgataaagatagttttccaacttttttcctgtatttatcattaaaagcaataaaatatgtcattttacatgtaagtttaaaattatttttacatgaaaacaaaagatttgttggacagaaaagaagttaacaggcttgttttacttattggtttgttttaaaaggagaaataaatgttgatcttaaagtttcatatcactttctcttaaaaattcatgggatgagtaattggatctggtttagtgtctagaaaaatgtgtatcacacygtaagtgttcagtaatgttacatattattattaccaaaatcattatcacatctttcttccattttaaaatcaactataatcagtcataccaattccttgacwactttgttgcagttgataggcagactattaacaatttttaatcttctaaactaaggtaattaattggtaacttatgtattttctgcctcttttaaaaataatttggggcagtccaccacaasgaaaaaacttgttaataaattagtaatgatayaccaaagtatgaaagcttttaaaagtgagtaacaagtgtaaatgcatgtatgagcgttaatcagtttcttaatattatttactggagaaaaatgtgaaaaaaaaattctaagtagaaaatagttgtatgttcagataatttatctgaaggcaattagttttgtttcaagtttttcagtaactaattctctggaaattaatgagattactctttactaataggaaaagaatggcattgaagcagatttccagcaacaagtgctttgggggattgcagaaagtttttgaacatgacaggtaactattaagaagatataattttagatacctcattctgttggattattttgttctattttaaaaccaatctttatctagatattatagtamctcattttacttttaaacttgcttactctctttctgtggttatgtatttgacaattctaccagacttaattaactgtggatgtgattgtgtgaggtagagccttaacagagaagtatcttcaagctttgacatgatgctcttctgaaactttatgaaaatgcttatgttgccagtaaaaattctgaaaacattttctttgaggatctctaagtgtaggaaaaacacctggactttttgagaaagatggcacactaaacacatgcatttgcttccgctgcctccaaaamtctgactaacatggcattaagtaaagagattaaacacacacgcacacatacatatacctataaaggcataaagaagcaggagacaggagctaagaataacattttagaagcaggaatacaaatggagaggtagtacctgacttagtaaaacctagaaagctacattctaaacataagcaagaaaacctgagaaatgacacaatttatttaaagccatagtaattggaggcaccagggacccctgaaaataaggataaaagttgagcttagaaaaaagattaattgaaagtctgtttttaaaaggagatagatctgagagtgtcccagctttatggactgcctcttcctaactctgggaaagattggaggtaagttctctagagaaagtaaactgtttgtactggggaataccagacacaattagtgggattgtgatactgcaaatagattaagcaaaagtttgcacactgagtttcttccactagctttcaaaatttggggacttagtcttatatcctttagaagaatttctttgtggggagtttgagtagcccaaaggaagagatttcaagatactgagatttgccaacaaagtaacctaaccagaccttacagtaaagcaatgattgacaactccacctgtaggcacagtgctttcaactagatttttagtgtttctctcttaaataggagtggacagctaaagatcactagacatttgtataaagtctttaatttgatatgaacttctcttcatatcaaagtataaaagatattgacctcttgacttcataggatgctattaaaaaatattcaagtacatggccaggtgtggtgacttacacctgtaatactaacactttgggaggccaaggcaggcagatcacctgaggtcaggagttcgagaccaacctggccaacatggtgaaaccctgtctctactgaaaaaaaaaaaawaatatatatatatatatgtacaaaaattagccaggcatggttatgcacacctgtagtcccagctacttaggaggctgaggcaggagaattgcttgaacctgggaggcagaggttgcagtgagctaagatggcaccactgcactccagcctgggcgacaagagcgaaactctgtctcaaaaaacataaaataaaaaaatcctcaactacaaaaaagcctagacatttaaattttggtagtagaaatgacaaaactcaatagaatggttagttgaacattctagaaagtaaaataagataaaagtgataaatcagaaaggacaacaaaattagaggactagtccaaaaatccaacattaaaagttaggaattttggaaaatagaacagaaatagaggtatagatataaataataaataattcaagaattcccagaactgaagttgccagatttaaaaagttgtctagtacaatggatgaaaatagatctacaccaacaacatagtaaagttttagagtgttgggaacaaagaaaattctcaaacattgagaaaaagagaaagtagattaagaatttttcaaaggtttaggtcagctcaacggtattactagaactaagaaggcagagcagcagtgctttcaggattctgaaggataacttctatgtccaaccatattgtcaattaagtgagagtagaatgaagatgttttcatatatgaaaggtctcaaagtgtatttcccatgcacttttggaagcaactgaataatatgcttcaccaaaatgagggactaaagcaagatagctgaaggcataagatccaagaaaacagatcagaggagaaagagtttccagatgagtggagctatattaaggcagcaactagaaagcagcaggtcaaaagttggagatggtagccagtaattacatgtagccatttacatcaaattagctaattaataaaacttcagtcccactagccacatttcaggtgctcagtagtcacatgaccagaagctgttgtactggacaatacatagatagaacatttttattaatatcactgtagaaagttctgttcggcagtactggtctgaaggggtttttttaatgtagatgaaattgatagaactgactgtattagagaggaaatttatgaaaccaatcagggttgggggagtttggtattgaattagtgatacatgcagagtgaccacacaaatatctgtgcatgagattgtattcttttggtaattgagcaacatcttaatgacatgatagggacagaggtttcagaagattgcttgataatcctgttgtgttttttttttttttttttgcttttacataagtgttaatcataccactgttgaacatactttagacctgatttattccacaactgcttgagaaaggtcctcttttaaaaattttgttgtaataacaaaacaacatgaaatataccctcttaacaaatgtttaagtgtgcaagaaaggtcttaaggcaccaaccattctgtaacaagattatgttctcttgattttacgtattgataacagatatccctgcattgaatatggatttgatatagtattataatgaaagtaaatgtttcarcttccctaacaaaagttgaaaacctaaaaacaaatgtcagaaattttttgtgccgtcagtcatcaacaagaaaagttgcttagaataatgtggaaaaagaaaatcaccaatatgcagagaatggaaaggagcatacagaaarcttcccatgatggggcctttgtgggagtctattcctaacaaggaaggataaccagtaacaaaaaggagagaattaccagctcaatgaaaacaaaaaamactgaaagaaaaaggaaagtaatgctaatatactacatggcttatctctgaatagcatttataacttcttaatattgattaaccaaaattatatgtgatacgatagtggaaggagaaatgtaggggcatgcagagagcaaagacagggagctgaaagttaactaaaatccttctataatgggaagccaatagataataactaaaaactgaaaaatctagaagcagtaataaagtcatattatgtagatagggacataaataccagaaaaatcaactaaaagaggtaaattaattatctctggaatatggaaaatgagaaggttggagagttttttatatatttagtttttatatatatttagtttttcataacagtgtgtggaagtatttactatttagttacagtttactttaaactatgtacttacataactttgataaaaagataggtgtttactctgaagtagtaagagtttacttccatttatatgatgttttaaataaacccatgagagatcactgttgcatgaattactgtttactggaaaaacgcctgtggttttaatcaaaattgtcttttctagttgcattaatagtgattgtgataaaatattagtgatgaaagagcgaattaaggatgtgttgcattttagtgcctatgaacaaatatgtaagatctcaagaattcatttttttatgaaagatgatttgtcatttcatacatttctttagaaacaaaaactattttttaataaatgccacaatgaattacatttattttttcacttattttgcccagaatgacagtgccatgcaaagtataggctcaggttggtttagatcagtatgctaaattgaccacattctttctttaagggacaagtatattcgttaaatgttagtggaaccacttattttgaacattaaataacttattttggacctttagtatatatcttactttttatatagtgcataattattttgtttctgtattgattaatgaggggcattaatattttgttgttgtttttgttaaaactagtgttgaactaaactgcaaaatgaaatttgctgtctacttaccaccaaaggcagaaacaggaaagtgccctgcactgtattggctctcaggtaagtattatgcatttgagttttataaagtcgtttctattttctttttaactggcttatcttacccttttattttaacttggtaggctttttgagccatttatgaaagactttaaggacctgtcatagtctactctgttacttttatcctcagaataatttcagacctactgaattatatttatttcatatatttttctaatagaccawgtaatttagcagagaatgtaaagttctgtactcaatagcaagggcttagaaaacttatttacttaatttggacctacccaagcatttctggagtttatagagactttactagtccattagaacaatattaggtgaaatcaggacaccaagatactctaattagaaaccagctattgtaaaaagtcaaataacttacagtgttctctaaaatattttaactggactccatagagcttctctgacaacaatctggaaagtcacaaaagaacgctaaggcttctcttaatcagtgtttcatattaactactgtagaatagattgtgaagagtaagattttgacacctgcagttttgaaacctctatgctaacttttctttcacaagacgctggtacttcatcttcagaagcaaacataaggagagaatcctagcaactaaattgtgtcacagagtactattttaattttgtttccttcaaattggttcctgtaactttgatttaacaaatcctccctcatgtgtgtttcatcaaggacaagtcccaaataccagtctttgaaaatgagaataaatatttcatcttaaagggtaaagattaagtgcatatctgactttaactcaagaaaacatttctgtgattgaatgaagagcactgattttgctagaagagcattaggtattgctaaaagcaagagcaacaaaattagttatttaattgtcttagaaaatataatattgtatagctaaaaatgatcttagaaatcatgtaatccctagaaagaaaatgaggcccagtgaagctaaatattgtccagggtcacacgctaatgtggagttgaacaagttttctgactcacagtccagagctgtatttagttttttctcctgttgtttttgcgttttgtttctggtgaggggtactatagtcatatctcttggctaaacaataataaccagaagccctgaggcattgtgtcataggtactctaataatagggccctaagttttaactaaaattgaatctagcaagacatatctgagctttacaagtataaaatacagaatttttgtttgtttacatcaaatgacaggacagtttccttagtgagatgctgaagaacagatagaccttggaaattaaggcttgattttctgagtaaaggtaagattgcctgaccagtgcacgtgagaaatggtgacaaaaaaatttcagaaggtttacttcccagcaagtctaaggaaaacaatgacagaaagattacacaattattatrtagctaaaatagagaaattagctgaaatcaaaacagccaaactgaaatcttaaaagatagttcatgtgtagtgatttgtatctttcccaagtgaaggtgaccattgaaacagccctttattagctgtgtacccaatagaattgaaaacatgtccatacagaaacttgcacatgaatgttcatggcacactattataatagccaaaaagtataaacaaaccaaatctctctcaactggtgaaatgatcaataaaatcgattgctagttcattcctcaccattctcacatcattgtagtattagatacctatagtaaaagaattaagtcatctcctctatcatgactgaaaagcatggagctaggaaaaataacagaaacttctaaaaactgaggctaaaactcaatttaaggatggcatatggtcaccattactctctttttagttcagtgaagaatacaaagatgattaagctaaattttgttgctgagaactatctgtatgtaaaaaaaagtatttgtattatgaagaccatagtatttgcttatttactgtgaatatgttttggtgcagaaatagtgcgatgtttaattagcatatttgataacacttcactggggttgttttaatattgggcttatgcaccatattgtcactctacagtttgaaaatttctgaattcccaaacactcctggtccaaaggattttagtaattgaaactttagtagtgattttaaaaggatagttatgggatcacttaacctaacacagttcttaggttaatactattacaaattttgtgaaaaagtgaattttagtgtcttactcaaaattgtttctaaagcaaaaaaaataataataccaaatgagcttgttttcctgtattataaacagtttaaagcttataaaccattcacaatatagcatgagataatttatttttaataatttcaacttttattttagattaaaggggtacacgtgcaggtttgttatatgagcgtattgcgtgacatggaggtttggggtatgaaagataccatcacccgggtagtgaacatagtacctaactggtagtttttcagcccttgtccgtctccgtctccccctgctctaatagtccccagtattartggtgcacatcttcatgtccatgtgtgcccaataacaatattttttatcttcaggtttaacttgcacagagcaaaattttatatcaaaatctggttatcatcagtctgcttcagaacatggtcttgttgtcattgctccagataccagccctcgtaagtgtttgtggtctagatatcctttgtaaaaatctaaatctttaagactggtataaagtggtatgatatatacattatacaattcattttatatttttgctgttatctctattaacctttcaagtggcatcatgactccaaaataccatgctgtacattttcctcattgaattttactcatgacatggcctttatgaaagaggatagttttgctattcccattgtacagattaagatacttcaaagcagagattgagcaactcaattcatatatcatgttggcactactgtcaaaatactaatgtgtaatgcataggaaattatttttctattccagaggtatactgtcttgttgcatgataattacatcttttttcatctctgttaayatcaaccatacagttaaacaagtattagttttaatataaatgatttgaatatttacattagagaaatgaaaatatcaactacgtgagactcaatgcatcagacagttaaaacttgttttatgactctagaagtttcaggaaatggaatttaaatggcagtaaaactagggaagttatatggctggcctggcaagtagtatatttcctttcacaggccatattatacaaaaacaatgcatatctggttagaaatataacaacagatttaattcaaaataatatcaaaaatataaaatacgaaaatagrwatataaaagggaaactaaaattttgttatcataaacgaagactttaataaatgggaaaatgctgtgtttctagatggataaaatgaatcttacgacaaggtcatgtctccaaattactctacgtgttactgtaattctattcaaaatcccaatggttggctttttaaccacatgcaagtatataaaataaaatgtaacaagttaaaaagaaacataagaaaattccagtggaggttggatagataggaaaaatgtgatggaaagcatattagaaaacattttcagttcaagatagtaagttgagcacaagcatctgcctccccactcctgtgtaaagagaatttaaaaagtgctgatagtgagagagggtcatcagggaagggatcacaacacatttctgaaagataaaaagaggatataagtcctttttgacaggtaaaccagagtaaggaaacatatgttcagagtacataagaaacttcatcaacaaagaaagttagtgtatcttaccttggcagctgaatactccagcttggaaggtcattttttacctcattggccagaacgagtcgcagggccccattcaagggcaagaggagcaggaagtataatcctatcatgtgctccaaaaggcagagagctcacaacatttggtgaacagttcccatgcaaatggacttgcagattcatctgaaagtgtgttattaaacatgggccattactacagagcagatgaaaccacaagattgtttcttgataggtggctgcaatattaaaggtgaagatgagagctgggactttggcactggtgctggattttatgttgatgccactgaagatccttggaaaacyaactacagaatgtactcttatgtcacagaggaggtaatttaatttgtattgtaattattaattgatgactgccaagagtttgattttgaacacaaagtccttacaatcctgaggattttaaactagggtataaaagttactagtaaaaattccaaagtttgctagtactatagttctatttactgcaatttaaattaacactaagtacaattaaagaatataatcattatattgagacctgtttatactacccagaataaccaagaaaatggtatatgaaaaaaacctttaatttgcctggcagctggttcatttggatgtattttatagtgataagccaaggcttagttagaaaacataagtggtaaagcattacctctattaataatatttgtatgctgcttatgcattttctgaattttatatgattttcattgttactatgtatatcataaaaacttagaaacaatagtgtaagtttttaattacccataattctgttacccccccaaaacacttatgttttggtatgttccagactgtttctatgactagttttcacgtaattctaaacttttttattttcttcttctttttaagttacatataaaaatattttctagtgttattctgattttaataattgtgtaatattctgtcatatgccataattgactttttcctcttatagaatacttatggttttgtatatgtttttaccctaataaatattactgcattgattatatttgtgcataatgttttctccctaaggacttttccttagaatrtattccaaaaagtgaaattactaggtcaaaacttaaaagcattttaaaggttctttctgcatcaccttcctaaagtgttttctaagaagtctgtaccatatattttccagggatatattaataatcatggtctgcctgaggatttagttttgttttgttttcattgttactagttcaaaccattgtaagactatgatttggcagtattgattgtgtaattattttctgtaactttgaaatgtctgaacttattttctttgatatcttttgtcacactattaaattttttctagcttccccaactcataaatgccaattttccagtggatccccaaaggatgtctatttttggccactccatgggaggtcatggagctctgatctgtgctttgaaaaatcctggaaaatacaaagtaagattatctaaacttctagtgataaatatttctcttgaataacataatattaggaaccttcaaagagtaaaattacaatattgttagtattggaactaaacttytctagtgttgagaactttggggtgtttgaagggtgggtatttaatttgaccatagagtgtatgctgcagaatcagacgcataggaattcagcaagagtgctttcttattggcctactggaagtattataaaatgtagcttctcctttaattgtttttattccaactatagttttgaacacactttttttctgtaaaggttattattactgattaatgttatagtggcaggatctatcatttatattcttaccagggatgtctttgtaaagttgactttgattttctgaggtaaaagatatgatttgtagaagcttaagaattgtgttcttaatgcctctaatgaaaattgaaatgcagcttgattaaaaaacatcactctcagcctttcccagagtcaaatttgaataactaccatatgtagtatgtcatactgtgcagaacagcatgttacaagagttgaataaggaagtgttaaagcaactagcatcttaaaatttcttctgcctttaaatttacagggctgttcatgcccttaaaattggtttaattcatttcctcctcttaggaagaacttgattattttaggtgtgctactgagaaatgaaaacatttctcataacagtttctttctgtggcatcaaatattttgtttttggtacgctttattatcaagttttattaattcatggcctgacagtgggctttctaagtaagcacttttatttccattttttaaggcagtctatcatgtctgaggtagaaaagcaaacttagttgatttttttgtcctttaaaaaagctagtagataccactaaacatttacattgatgagtactctgaagttgagagatcccatctctgcatctcatccagtgaaaaagaacattgtatagaacacagagttgtattaaaaattctgtcatattgaaatgcattgctcactgctttgttggtactgtttaagagaaatgtgtcagatttagtaacatgttcactaaggtaagcatgaactgttttatatcactatagattaattttcagtgctaaaaaagcagaaacgctgaacatagacttctgtttgtatcttaaattgcaatgtattgttttgcattattttagcaactatacttattagctctcttaatagaatacacaaaagatgtattatggaaaggcctgcaatctaagccagcaatatatcaaaaggaaaattgttcacagggttttcatggcaagtcagaatttttaagcaagttgcaagtaacttctatatttttaagtaagttgcaaatatctattcatatttaatttagcaaaatataacttgtttttaaatttcttttgtttctgaagtctgtgtcagcatttgctccaatttgcaaccctgtactctgtccctggggcaaaaaagcctttagtgratatttgggaacagatcaaagtaaatggaaggtaggtactgaatggctgtcttaatactcattcttaagtttcaagtttgtttaaaaggttggacatatattatattcctaccctgctcatgttagggctctagagctgagacaaattagcaaaagatatatatatatcgatatatatatcaatatatgagatatatattattatatatattattttatatatattattatatatattattttatatatatatatatataaatcaacaaaaaaccctactttctaattgtattgaatcatggcagatattctggggctatattttttttctactaatggttaatttatatttttatttctaaattaacatcacttctaaattaaccaaaaaataccacatattacaggttgagcatccctaatctaaaaataccatatattacaggttgagcatccctaatctaaaaattcaaaatgctacaatgggtatttccttggagcattacctttaagcgtcatgtgggtactcaaaacgtttcagattttggarcatttctgattttggatttttggattagggatgttcaacctgtgttactaaatttagacttgcctcttattaactatgtgctcagttgtgtaatagaagcaaagaagcctggctttttaaattactttgttttcaaaatttagcatttcagatctcgattttaaattccagacacgagtctttaaaaatagatattctgttatgtacatttatgtgaatattcccacagcaagattgctttttcaagcatgcaaacaggtgctttcaagtggaaataaaaatgaccctttttcctgagagccatgttactcttgtgcagaaatgggccatttacaaactctgccaagagtttgaatactttgcaaatgaactcatcatgatgtgtattgttaacaagcagaaaatacttgaatgggtaaaaaatgcaacttctttgtcttaaagtatttaaagtatagttctgtgttcagggttcattcctacatgaacccctattttatgtaaggatgattattgaaattccaacacattttatttaaggatgattactgaaattctaactaattaaaggkttcatcctttagtaactagattacagttttgtttaggcttgaatttttactatgtttgaagaatgctagaaatgatttaggattaggtcctttgagaactgacattgcatgtacatcagtgttttgagtcttcatctggtgcaaagtctatgctaggttctgagctgttttgtcacgaaaatggtgaccctttcacatccaccaggggcttatggtctaatagaagaattgggtaaaagaccaactaattggagggtgaaggtgagaggtagaggtacaggtaacctaaaaaggaatctagatatgtacttttctccaagtgacagtagattttactgtcttaattatgttgtatttagggtattatttaatttacgattgaaatcaggaaaccatgtagaattatgaaatcatagaatttagaactaactagtcagactttataggtcctctcccactctaagatgaaaggaaatagaaccttcaaaagcaggatacttagaggacaaatcttttcgtggttgtttgtcttggtcaatgtataaagttgtggttaatgaatatatatgaataagaatatttcgaggtggatgataaaacataaaattgtaactagtggcagctcctcagagaataaatttgagatgatgttgatatgattcagatgattcacaccaggtgtttctgaaagcttatgtagatagcagaggtttggtgctgttcaacagcaaaaaagaaggctgaatgtgtttatgtctggaattacagccataaagaagagacataaaaaaaaagattatctgaaatagagaatatttggaaaaagatcatggagttagaagaagcttctagtttccaatttgtggaaggagttacaaaggaaaaaaaatcatgttcttgctggagccaagaggagattaagaatattaaaggtttagaaggaaaaaggccattttsttaagaatccctgagatatgggattcttgccactagtctaggactgcttgaaagtagggaagagactattattagaaaatagaattccgaagaccttgtaaataaaagcctggcaagtcagattttgaaccaacttaaaagcatatttctgatttaatcagcctaagagcttaaataactttaaatttctgtttggtactagtatagtatatcctgaagagtatctttgaatttatttttcaatgttacttctctttttacaggcttatgatgctacccaccttgtgaaatcctatccaggatctcagctggacatactaattgatcaagggaaagatgaccagtttcttttagatggacagttactccctgataacttcatagctgcctgtacagaaaagaaaatccccgttgtttttcgattgcaagaggcaagtattaggaaactttagcttgatctagataatgtaactatgaaaaattaggattctgtgatattttcttaactttattttagaatataaaatgctacttctagtaagtttttaattatattcagacacttgaagtgaaaacctgcctataaaattaattatatctaacactaaatttgatagarataggaaagcttttggcagtgaaaaatattgttttccatcaaaccagtaaataacaagatttttaatgcttgaatgatgattaatcttcagcattagcagatacttctttctttacacatggacctttgctgcagtagaataaaaaggacaaacttctacctaaattactccttattttatgtatatattttagcctcagaagttaagtattatttatcacacatgtgctttatattatttgactttcatattaatctattcattgtgctacttgatatttctagttgtttaagaataattactgaatcccaatgggcttgcaagttttttttaactaaaatatttttgaccgtccactactcacctaactctatatatgctaccatagtcctaattaaggaagttctgcttttatttttaagaaaaattcataagcttcagaatataatttaaaatattttagagtgaaaaatgagcactgaaaattatacatggtcatgatttttaaataaatttttatccatgtttaaggataatgtgtcaggcacattgatctaaaatgtaattacgatggtaaatgttcaaatctagatcagtgtgtaatgtggtacattagtttgtaaaatgctttcacagcattaactcattgttaattcttataccgccaaatgagatatcatttctttcctatccatctgttttacaaatgaggagacaggctcagagaagtaacctacttatctaaggccacatagctagtaastggtggaaccagaactggaactaaggccatttaactgcaaatactgacctcctgtcatttatcaagccattttcagacggcatgatattctcctgaggagcaaaggaatggaattagagctagcacaaggagaaattgtgcatagcttgctgcctaygtaacttatgcagaagatctgagcagtcttcctgtttttagggatattttgcacatgtgaactatatagtgagaaaatgtcaaaaactaatacatgatatactgtttgtctcttagtgtccatccttgagtaatagaattttgttttagatttatttgaacatttaccatcacaattaaattttaggtcaacaaccagccttgagaaatccaaataccaatttgactataaatatagtaatacgtttaactgcaataactatagctataagtgcgtaccaaaccatgttttttccaaatgaccttaatttcttggcactacccatgttggatacctcatttgcttccccaaagactgkgcccaaaatttctgttgtttctacaatgattctgcctgccaacaaagtctgaaaatctcaagtttgttataaaaacagcacagttagaacatgatgacattcctggagggaaaaataagtccacttatttgtttctaaaatgcctgtatcccaagcaactagaacacatagttggctatacttaatgaggagtcaagacaaaccattcaattcttctaaaaaagtaagaaagtattcaaagcaccagagtcacaatgttgagctcaggtgcaattttctattcactttacttccagcatggtcgggttaagagtggactacatagcttgaagcggatttcgttgagattcgttgtaattgaatcaacaactgaatgagcatgcctaagtagtggctccagagagtctgctttcagattttcttgccagctttgacccaagattaccctgggtctgcgagttttatcacctgctttatcatttgattacaagtatagtataactgtatttccttgtgggatagaagctgtaaaaaataagctgaaaataataggggatatatataaataaacgatctgagaaagaataaagaaaataattacaatcatgcacatgatttactcaacttcattcttttacctctttttaatggtgttaaatgctcacaatttatatttatactctgtcgaatgtcaaaaaaaattttttagagagaggggttagtgcatcggggatatttatttggttattattttatataattttttctttttctattttggcttcagggaatctaaattgaaaaaaaaatactaggtagcagaattctgatatctagtgtacagagatcaaatcttagtctgaaaaagaagggcctagtatgtcttatctttagttattggagttacacagtgagaaaaaaaaatttagtgacctaatactgtgaagaagtttccagaaatagtaatctctttttgtggaatagaaggagaggctatactrcctccttaagtctcaggacctttttgaagattgagaggctgttttagcctctgcatctgcctgctagagaagagtaagaacatggcagagaatcccagaaatgtagagctctctcattcatctctgtatcccatgcttatttagcataggtatctagcacagagactctcaatacttgttaaatgaatacagtgcaaagtcttcctccttatacactgaagagatttaataacctggggattcttatccaagcttttctaattgggtctggaaaatatataagaaaacactgcctgttaggataaacatccatcatagctgctggagcactgctccctttttgagagctgagtgaagaatgaaagaatgaaaggtgttcatttatttttatactccaggagtcaagagttttgctaccaaggattttccatttaaagtgtgaggtagaggagaaaagtccccttcaagtgtcactaaacataggcatttgcacaagctgcttaacatatcataccaactcattcatcaaagaatttaattaaagaagccatccccatttaataagactgataaatagaaaccctcgtcagggatgatacaattagctcgaattgtgtaacttcagcaggataccaattgttcaaatgtattctattgcctttttgttgacattttttaaaattcttgggccctcaatggcaggcattttcttctttctcatataggtgaatctttatcattatggaacttatggtcatttgttttggattttagatgtcttgtcttgcaatatattcctgggtttaccttgggacttctctaataataatgatggctattcatatgtgtctgatggctcttaacacacaagaaactaaggataaaaatatggcatactcagtcacattggaacttggtcacacaagtcttttgagatatctgtttccctgcatctgtacccattttctatcagatccatcttttgatctgtgaaaaatggcagataatacttggtacattttacaggtttggtggcctaaaactccaggcctgtttaacttcttaacaattcaagaattatatggatggaaaatgtttttctttacatttctttctttatataggaaactgtaatttagctctaaattcaactagccagctgggactagtctaatcattgagagacatgacaccaagtaattccgaggctcagctttaatcttgacaacattcctgtcacattcacttccatgatagaagacagattgctttagaagacttaagttaccttgaccttaaactagaactttttattaacagctgttcccaagataaacatttaatacctctctggaagggagagattgagaacatttactgattcatcaaaaccttggggatttccttgttctctgaagcgtcagtgatatttttattagctctatttttatttcttaggtgcttagaaaaattcccatcttttcccatcagtgaccattcactagttcaaaatgggaaaaacaaaatctttgttagactttcatttctttcggtttattcaaccttgtattttaattgtagatagggataaattatctggtgtttgatacccttagaaagttcttcccacctggagtgtaaattagtttaaccattgtagaagatagtgtggtgattccgcagacctagaggcagaaatgccatttgacccagcaatcctattactaggtgtatacccaaaggaatataaatcattctgttataaagatacaagcacacatatgttcactacagtactattcaatactattcaatagcaaagacatggaatcaacccaagtacccatcggtgatagactaaataaagaaaatgtggtacatatgcaccatggaatactgtacagccataaaaaggaatgagatcatgtcctttgcagggacatggatggagttggaagccattatcctcaacaaactaatgcaggaatagaaaaccaaacaccaggccaggckcagtggctcacgcctgtaatcccagcactttgggaggctaaggtggacggatcacaaggtcaggagatcgagaccatcctggctaacatggcgaaaccccgtctctactaaaaatacaaaaaattagctgggcatggtggcatgcacctgtagtcccagctagtcgggaggctgaggcaggagaatcgcttgaacccgggatgtggaggttgcagtgagccaagatcatgcactccagcatgggtgacagagtgagactccgtctcaaaaaaaaaaaagaccaaacaccacatgctctcacttataagcaggagctgaatggtgagaacacatggatatatggaggggaacaacccacactggggcctgccaaagggcgatgggagttggggaaagcatcaggaagaacagctgatggatgctcggcttaatacctaggtgatggcttgatctgagcagcaaaccaccatggcacacgtttacttatgtaactgcatatccagcacatgtactcctgaacttaaaagttgaacaacaaaaaaagaaggaaaatgcgttaataccttattgtaattattwtttttttggaagactattttttatattcagaagaagtgtcagagtcagcagaaagggattatttctccatttacctacaacaatggttttaaatgactggatagatagaaatctctttcaacttaactgcttagcacattgcatttttctctgtttcatgttagttttccaaaggattactgactttttacctaatttgctaagggatgtcaggccttaatgacatatttcycctcamataaagatacaacatgcttttactgtgtaggaggaattgttaacaggatttatgatggctgtgtttgacttcccaacaatgatagaacatttgggcatttttatgttctttttctatattgtttgtgtgcttattttgtgttttaatagtcactgtcttactgatgtgctgcatttgtgaattgaaatgtcttgcccatgtttctaagatctctaaatcctgattcttttcatcttggttgatatgacagtgtcatatcaactgacactgtcaattgatagtgtcattttcaatgacagtgtctactctgcatatttaatgcactctacagtgttgatatgacatgtctactctgcatatttaattaatgtgttacttccactctttacatattaatggcagcatttagaagttaggctatgtttagaagctaggcagaatgtttagttttccttcacatttttgctgctcttttaatgtacagtgaaaatgttaaagtacaaggatgacaaccttgattttattataaaccttcctcatacttccttaatgttatgactatttgtaagcaaattaaacgaccttagagatatatttaatgttcctaatactgatgttcctgaatggtagataaatgtcttatcatctctttatcttctagggttatgatcatagctactacttcattgcaacctttattactgaccacatcagacatcatgctaaatacctgaatgcatgaaaaaactccaaataagagaatctcttcaggattataaaagttgtaaaatgcaactgtattgctgagcaaaaaaaaaaaaaattcaaaacattggattttatagtgctaaaagggctttattctatagttgaatcacctctgaataaagatataaaacctacttctgattttaaaagttattttacaagtgttcacataggaaatctttaatgctctatagctttttcagtgtcgtttggaaattcttgtattaatcccaggtcatagaatatgaatgtaatcctatttgaagtatagagtagcaactctggaacagaagacttaaaagtaatttagcccagactcctcacctttccagactttaagcctctgaagacattggactgtctttgtcatgttcattgttgtatctctagtgtctagcaagtgtctagaaagcaaatatccacttgatttctagtggatatttaataactgttagctacagaataaagaggtaggctcagaaaggttaaatgaattccccatcgttacacagctatttgtgggatattagaagacagattttcttttcttacctattgagtctaatatatttgtgaacattggtttttgggtgtattaaggttctcaagaattaaataagattcaatctgaaaatggctaaataaggaaacgtattagtttcatatgttactgtaaacatgaatattttcccatagttgcaagcagagatttaacttggtgagctcaccaagaaaagtaatatctctgtaaatacccaattgttttcctttaagaacttttaatagacaaactttttgaaatgtgataaaagccagtaaaacatgatagaagccagtaaaacctggctgctttaaaaatatatttttttctgttaaaaaataaattttaaacattcagtaggaatgcatattatggtaactgaagaaaatgacattaagttcctaaagttataaaattagtattatttaaacatcagtagtcaaggttgagcccttgaatgagctgtacacagaatggttctcatttaaacagtcttgtgtcttctaataagatcattcatgaacgttttacatgctggtaatttatttgtgaagaaaaacaattgtccctaagatcattgaggttgaggtttaaaccagggaagcaaaactagtaggagatatatacattaagattttttttaaaaaacgaggaattggcatacctggattaagaaaatgtggcacatatacactatggaatactatgcagtcataaaaaaggatgagttcatgtcctttgtagggacatggatgaagctggaaaccgtcattctcggcaaactatctcaaggacaaaaaaccaaacaccgcatgttctcactcacaggtgggaattgaacaatgggaacacttggacacaggaaggggaacatcacacactgaggcctgttgtggggtggggggaggggggaggggggagggatagcattaggagacatacctaatgctaaatgacgagttaatgggtgcagcacaccaacatggtacatgtatacatatgtaacaaacctgcgcgttgtgcacatgtaccctagaacttaaaagtataataaatatatatatataaaaaaaaaaaaaaaaacaaggaattggcatacctgattatgagggctggctaagcaagtccaaaatccatagagcagcagtcaggaagggacaggcacaagcaggacggactctgggcatgggctcaagctgttgtacacaggaggaatttcttctctcctggtgaggcctcagtcttgcttttaaggccttctgattaagtgaggtccactggattgtctctcctctttaaagtcagttgattagggactttatctgcaaaattccttcatagcaacacctagattagtatttgaataacaggggactgtaacaaacagctaagttagttagtgtatcattgttagaaaatagttgctttgcttttttacacgtaaatgcaaaacatttaaatattcattaagtaattgctgatgaacagctaatgttagtaaagacaaagacctttagttaaaacagaaatgactgttgaggataataaaccaatacatttgagcttgcttttttgtgccacaaatgctggcctggggagggatgagtccttatcaatgcctaaatgtaacatgagtttccccaactagaaagagttcaatcttaatgtctctcatattgtaaggttccatctcagtgacatagttaacaatacataacctaaacattaactcccaatgcttgtttagggtgtttctagaagtcacctgacaatcaggtataaaaggaggtaaaggaatctgacatttcctggattatgttcaatgtaagacccttgtgaagattatgttcttgaagaaacgtaatactgtaaagccaccaccatgaagagtaaaaggacaagccacaaagtagatggagatgcttgcaacacatatatctgacaaataacttgtatctagaatgcctgaagaactctcacaaattcttaaaaacataaaatttggcaaaaaatttgtacttaacaaaataggacaaatatggctaatgaatgcctgaaaatgtgcttagtaagactggggaaatacgaataaaaactacaatgcaatgaacctacacacccacctgaatggctaaagttcagacaatggaaaatcccaggtgttgacaaggaaacatggcgacctgaattatactgctaataaggtgcaatctggcaggatctgctaaggtctagttcaaccttagcaaactggtaaggtctgatgaggcctcagaccttacttagcacgtctcctatagcctttcaatgcatgtttctgtacttaacaggaacattatggctacatgagaatgtttacagcagcaccatttacaatggccaaaatctagaaataacctgaatccatctataacagaattagtaaaattggagcatattcatacaatgaaatattctacatgaataaaaataaacacactataactggatgcagcaacatggatggggtctcaatcataatctggaagaaagaatcctgacaccaaattatgtgctatataataacttggtaccattttatatgcatagtattgaagacaggaggtgttacacatagcaaggcaatggaagggggtggtggggggcattctgagggagaggtgattggagcatggcaggagagagtactggtgatgctatcttcatccaggtgcttggtacatgagcatgttcactgaaaattcatcaggccatacacttaggatttataaactttttaatatgtgttatactttaataaggtttacattaaaagtatattaagtagttatgctgtgaagatcataaatatactactgcatgaagaatttaaaaatcctgatgttattgcaaagaatacttatcttgggggatacaatttccagtggctacatcgtttatcaattcaagtaatattgtatctcaaaccacttagaagtgaaggtgatgtgaaaagttgctgcaaaaagtggctgtaggccaggcgtggtggctcacatctgttatcccagcactttggcaggccgaggtgggtggaccacttgaggtcaggagtttgagaccagcctggccaacatggcaaaaccccatctctactaaaaatgcaaaaattagccaggtgtggtggcaggtgcctttaatcccagctactcaggagactgaggcaggagaatcgttggaacctgggaggcagaggttgcagtgagctgagattgcaccaccgcactccagcaacggactgagactctatctgccccctcccccagaaaaaaatggctgtagtgatgttactgatattgacgatgcaaatgagtttagataaaaccatgtcataaaatcttacaacagaatatttaatatttccaagctgacatatctcaagtatttttaaagtatacatataaaatctgtgacaagtaggcatgaattatatatttaaaaatgtataaatgtattcgaattagccaaagttttggatgttatcattagaaaaatgcagatccaggccaggcgcagtggctcacacctgtaatcccagcactttgggaggctgaggcaggtggatcacaaggtcaggagtttgagaccagcctggccaacgtggtgaaaccccatctctactaaaaatacaaaaattagcctggcatcatggcgtgcacctgttatcccaaccactcaggaggctgaggcagaagaatcgcttgaacccgggaggcagaggttgcagtgagccaagatcgtgccactgcactccagcctaggtgacagagcgagactccatctcaaaaaataaaaaaaaagaaaaagaaaaatgcagatcctctcatgttcaaggttgtcttgtatttaggcacactgggtatatacagtatgtaacagattacattgttttatcgaccttctgcaatgaaagccactttaaaattaaaacagccagatttttttttaagctttcatttttgaagcctagcctccaagtaatctgaagaattggggtttcggatgaagaaaggaaatgtcactgttggtgttccagtgatggggatggcaacagcagtagctaagaagacattggcagaggttgccgggggggtggtggggggaagtaaagatgcagcgatggccacagcagcacaggggaccatgacaaaagaggcatccactacagtcgaaatggaggacaaagtgttagaaccagtaagagtttcgtaaagtggctagaaacaatataactgtctcaaaattagtgatttttctataagtctatgtttaataaaaattattttaaaatgatcctattcacagcagcaacaaaaaactacctagaaagaactcaaaccagaattgtataatacctctagyaaataaagtaagtcttaaatggaaagcaatatcatattcatggaataaaactctcaatattgtaaagctacaaacataccccagattaatctacaaatgcaatataatcttaatcaaaatctcaaagttgttcatggagcttgacaagctaattataaaatttatatggaagaatatgccaagacggcttgagagagaacaaattgctctgccagttgtcaagacattataaagctgtgataattaaaacgggtttggactcagaagagttcatcccatcagaaaagtcctgccacagacccacacagaaatttagcgtatgttaatagcaatgtctcaaatcagtgaggaaaacatgagcctttctgtaaatggtgctgccaaattatttttcagtagctttgtggagaaagatatacaaaaggaggcctgtgtaaaggcatgcattgcagccttgtttgtaataaatacgaaaacaaccccaaatatttaagaatcaaagtaagttggtgaaaaatttgacactgtttacattttcacaagccatcaaaacaatatgtattttgctataggtacaaatatatttcatgggaaaagttctgaatggaaataatgagttacttctgggaaagaggaggagggcaccagagttgaaaataacagccagaaaagctttatttttggtggattatatcatttttacagaaaaagttattcatgtatattttcagttgtaaaatactaattttaaacactaataaatgttgaaaatcagaaagaacagtgcttacactcatctgtgccaaggtccagaaacacattttcatgcttcttactttgtatttctgagaacttaagttctggttcaaaaacacattggaattaaaaaaaaaaaatagaattaacatagctgactgtgtgaataatgagactttcaggagaagaaacccttgtaaggtcctgcctcccaaaggtacttcaggccagtcattgcatctttcaaaggccaattcctcactggaaagcagagtaaataaacaaaaacccctacactaactcccagggctgtgtagcaagacaagatacccacatgaaatctctgtcatcttatccagatgttagtgactagatgcattagggccattgaacttcaaagtgacccgtgccgtccttcaggggtgcacaagaccatccaatggacaggatta

SEQ ID NO: 95470 - DNA, 14265 bp, Homo sapiens
tctgttccaaagtccccccaatgatgcctctttccataggggagagaatggccctgggggcttcatcgtgctcaagtcggccagtaacccccgtgtttgcacctttgtctggattcttaatacagatctcaaggtggggtgctggggggctgccaggtgggttctgtggagtggaggggaccctgctgctgacttggttgctgcatgactttgggggctctctgccatgcctgggcctcccctttgtcagccacctttcttacttgaaaatttgggtcagggtccagatggtctcttagccctgggttgctgtagggcatgtgcccccccttcttacctctgagtcctgaggccctgaggaagggtggctggtggccagcccggccccaccctggtctgtttgtgttgctggtgccaagagccaggcccagcatgttcttcctgccaggggtgagtgggagagggcgacccaggctggattccagagctgcacctgcattctggcccagagcccccctgctggtgccagctgcaaggggagaccctgctgagggcaggccatcaagtgtgacttctgcctgccttcccccagggccgcctgccccggtacctcatccaccagagcctcgcggccaccatgtttgaatttgcctttcacctgcgacagcgcatcagcgagctgggggcccgggcgtgactgtgccccctcccaccctgcgggccagggtcctgtcgccaccacttccagagccagaaagggtgccagttgggctcgcactgcccacatgggacctggccccaggctgtcaccctccaccgagccacgcagtgcctggagttgactgactgagcaggctgtggggtggagcactggactccggggccccactggctggaggaagtggggtctggcctgttgatgtttacatggcgccctgcctcctggaggaccagattgctctgccccaccttgccagggcagggtctgggctgggcacctgacttggctggggaggaccagggccctgggcagggcagggcagcctgtcacccgtgtgaagatgaaggggctcttcatctgcctgcgctctcgtcggtttttttaggattattgaaagagtctgggacccttgttggggagtgggtggcaggtgggggtgggctgctggccatgaatytctgcctctcccaggctgtccccctcctcccagggcctcctgkgggacctttgtattaagccaattaaaaacatgaatttaaaaaaaaaaaaaaattccagcccctcccactgccttgcctcttgagggaagagaaaggcaggcagcagcttggatgaagagggaagacccctcacacagcctctcctgggctcacaggagggcggagcccggggagccagttcctgaaacatgccccccattccccccccgcccaccccccactccccgctttcctgaccagttcaactgagcagatgactggtcagaaaaaaatgccccgccccctgccaggcttcagcggggcaagtttaaagtctctagtccaggaatggaggtgggggtatgggcacctggcagtgcccacagcaagccttgactgtgtggcctggagatggggcctgagcttcagggtcactgaggcacctctgggatccaggccacctggagccccggacctcccagactccactcacccattccctctccccgcacggcactcacaccaggggcggcctggagcccggatcgcagggcggggccaggccactgcctgccttcctcctccctcccggctggcctgcccccttgcctgcctgcatgcaggcttccagcagagccagcttcttcagagccaggtggatcctgtttcggtcctgcctaggtgtgtgaccctgggcgaatctacctctctcagcttctgcttcccactttatgaaaatgggactgatgtcacagggttgttatgagattaaaagatatgaagaaccggggacagtgctcagtaatcaatagtctgcagttctgcacccacgtgctcctgggtactctgccgtccccacagggtcctcagctcagcccctgtcactgcctctcctgccaccctttgtccactcggcagtgttctcactcctcatccccccacacccaccacctgtctgccagcctcttgcaccatgagttgctactcctggggtgctggactgtccccacagccatctgtctcccctgctccccatgaagaagagccagtcccctcccaggtagcacatcagagcgggcaggctccagagctcttctggtcctcttgcagtggccagaaagtggggaaaggggcccagagaggggcagggactgacccatggtcacacagcctatttatggctgatctggagccaggccttctgactatcacccatcagagcccctggattcccatttcacccaacacaggtgttggggtagaactgggggccctccacccctactagcctgactgtctcctgagacctgtctcctaagaccacttayctgaccactggccatggggaaggaaaacacctggccaaggctcatgccccaggttcccaggcatgaagttgactgtctccgcccctgctggtgtggtgagggtgactggggactaggcactaggcctttggtgcaggcgcctgaggacgtggttgcactctcccttctggggatatgcccttgagcccaggcagaggagagcacagccagggcaggacctggcagccctggtacagagcccagagggggcatcagttcctgctggtcctgctctgtttacagrcaagctgctgtcctccctgcaaaggggagtgggtggggcagagggcaagtgccaggggggcacaaggctgggcatgtggctggcatgagacggtgtctgagtaatgtcaggcacctggaggcattgaccccaggaccttggaccccagacctctgaccgkggggcagccagygtccaggtaccccaacccctgccctgggtccggcgtccccccattagtgagtcttggctctacttatagcatctgacaccagaggggccgaaaatagcccctggagaagggggaggagggggctatttaaagggcctgggaggggagagagaatgaggagtgatcatggctacctcagagctgagctgcgaggtgtcggaggagaactgtgagcgccgggaggccttctgggcagaatggaaggatctgacactgtccacacggcccgaggaggggtgagtgtgggtctgctagagccctgcctctgctcccccagagcaccctcactgagccatgaggccagagcatgaagccctggagaaatttctgggggtgggggcaggaagaatgccccatggggagagcaaaggggaaccacccttcctgcccccaggtcccagcagcccaggggagccccccacccagcctgtgcccagagagcaacagctcccaggagctcactgcccctcccctctccccagctgctccctgcatgaggaggacacccagagacatgagacctaccacyagcaggggcagtgccaggtgctggtgcagcgctcgccctggctgatgatgcggatgggcatcctcggccgtgggctgcaggagtaccagctgccctaccagcgggtactgccgctgcccatcttcacccctgccaagatgggcgccaccaaggaggagcgtgaggacacccccatccagcttcaggagctgctggcgctggagacagccctgggtggccagtgtgtggaccgccaggaggtggctgagatcacaaagcagctgccccctgtggtgcctgtcagcaagcccggtgcmcttcgtcgctccctgtcccgctccatgtcccaggaagcacagagaggctgagagggactgtgacttgggctccgctgtgcccgccctgggctgggcccttcctgrctaggactgtggaggggagctgctggccatggctgctttrtagtttgcccagagttgggggctaggggaggggggagccagaggccaggatgcctgagccccctgagttcccaaagggagggtggcagagacagtgggcactaagggtggagagttgggggccagcacagctgaggaccctcagccccaggagaagggacaaaaggtactggtgagggcaagaggtgcctgggaggagtggccctgatccaggaaaatgtgaggggaatctggaacgctctaggcagaagaagctgggagggagggggaggtgaaaagggcagaggcaaggatggtggggcccccagcaccctctgttagtgccgcaataaatgctcaatcatgtgccagagttgcatctctttccttgtggttgggggggctggcccatgggtgtcccctcaatgcccacttctgggaccaggctccgcatctgagctaaatatggcagagctaatgggtacaccccatacttggggtgggggtgggggcaggacagagctgtaaacagggtgctgtctccagtctccttcccgtaccctgaccgctgcccagtcctggcttctgtgtccagccccctggcactgggtggtaaccagcaagccagctggcatccgcatccagggtttgtttcaatgatgtctcgtggagaatatggaggggctggtgccaggactgtccttggctttgcctcggggtgtgaacggggtcagtgacctctaaaactaacctgcctctcagttctgaatccagacagaatcaatcctcagctgtgtctcgctccacaccccctgccctggaagccagggaaggttggaggtgctagggggtcaggctcccctctgtgacccctgcagctgttgtggtgactcatgtcccaacctagctgcctctcccaaggagactttcccctggggacaagggggagggaatggcatggaggaggcccacatcaagcggggccaggaacccacggtggcaggagctgggctggtgacctacccagggcagaagggcccgggactcatccagaggggaaggaaggggtcttcaggaagaccacggagatgccacaggcagaattggcttcccatctgggagataggtggggagaccctggcattttgacagccagaacctggggtgctgagcagaatcttcatgcctggcctggccgctccttcggagggaagctggagggtgggctgcgagaggagtggggtcagagcccctacatccgcaggaccccaaatcggctgggccccaaggcccggactgcgctccccggtggccccggcggccctcsgcgaatgcgtcctgcccctcccctgcccaagccctctgccctcacccgggtccggcgccgcccccgaagtggcgggaacaacccgaacccgaaccttctgtcctcgggagcccccagataagcggctgggaacccgcggggcccgcaggggaggcccggctgttccgcccgctaagtgcattagcacagctcacctcccctatcgcgcctgccatcggacgggcagtgccgcgccctgctctggggcccccggagcgaccacagcggaggccggaacggactgtcctttctggggcggggtggggagggggtgtcgctggagggcccggtggcatagcaacggacgagagaggcctggaggaggggcggggagggggagttgtgtggcagttctaagggaagggtgggtgctgggacgggtgtccgggagggaggggagcctggcggggtctggggcctcgtcgcggagggcgctgcgagggggaaactggggaaagggcctaattccccagtctccacctcgaatcaggaaagagaaggggcgggctgctgggcaaaagaggtgaatggctgcggggggctggagaagagagatgggaggggccggccggcgggggtgagggggtctaaagattgtgggggtgaggaactgagggtggggggcgcccagaggcgggactcggggcggggcaggcgaggcggagggcgagggctgcgggagcaagtacggagccgggggtgtgggggacgattgccgctgcagccgccgccccactcacctccrgtgtgtctgcagcccggacactaagggagatggatgaatgggtggggaggatgcggcgcacatggccccgggcggctcggcggtcagstgccgcccccacagcggaccggtcggggcgggggtcgggcggtagaaaaaagggccgcgaggcgagcggggcactgggcggaccgcggcggcagcatgagcggcgcagaccgtagccccaatgcgggcgcagcccctgactcggccccgggccaggcggcggtggcttcggcctaccagcgcttcgagccgcgcgcctacctccgcaacaactacgcrccccctcgcggggacctgtgcaacccgaacggcgtcgggccgtggaagctgcgctgcttggcgcagaccttcgccaccggtgagcgggggaaactgaggcacgagggacaagaggtcgtcggggagtgaaagcaggcgcagggaaataaaaagaaggaaagggagacagaccaggcgcctaacagatggggaccaagaaacaagagatagctgagaggtgcaaacagaagagaaaaargagcaacatcccttaggagaggggcagaggagagagaggtggagagagggggcggagagtgctcagaattgagagctaaggtgggggatgcaggacagactgaggtggagatgcataggaggaaatggaggcagatgtgggacaggggtgagaaactgccaggatttcctcgctgagcctggctggtaggtatagttgttttctttctttttctttattttattttcatttatttacttatttttattttttatttgttttgagacggagtttcgctcttgttgcccaggctggagtacaatggcgccatctcggctcactgcaacctccgcctccccggttcaagcgattctcttgcctcagcttccctagtagctgggattacaggcatgcgcccccatgcctggctaatttatttgtatttttagtagagacgggacttctccatgttggtcaggctggtctcgaactcccaaccttaggatccacccaccccggcctcccaaagtgctgggattacaggtgtgagccactgcgcccggccagtaggtatagtcttctagatgtgaaacctgagtctcagagcggtgaagttcccttccgaagggcagcccatgttggagctgggttcagtctaactctggggccaatgctttttccagatggagacacatttgcagaggagaaggaagaactagagagaggcagggagatgcaggggagggaagggtaaggaggcaggggctgcctgggctggctggcaccaggaccctcttcctctgccctgcccaggtgaagtgtccggacgcaccctcatcgacattggttcaggccccaccgtgtaccagctgctcagtgcctgcagccactttgaggacatcaccatgacagatttcctggaggtcaaccgccaggagctggggcgctggctgcaggaggagccgggggccttcaactggagcatgtacagccaacatgcctgcctcattgagggcaaggggtaaggactggggggtgagggttggggaggaggcttcccatagagtggctggttggggcaacagaggcctgagcgtagaacagccttgagccctgccttgtgcctcctgcacagggaatgctggcaggataaggagcgccagctgcgagccagggtgaarcgggtcctgcccatcgacgtgcaccagccccagcccctgggtgctgggagcccagctcccctgcctrctgacgccctggtctctgccttctgcttggaggctgtgwgcccagatcttgccagctttcagcgggccctggaccacatcaccacgctgctgaggcctggggggcaccwcctcctcatcggggcccwggaggagtcgtggtacctggctggggaggccaggctgacggtggtgccagtgtctgaggaggaggtgagggaggccctggtgcgtagtggctacaaggtccgggacctccrcacctatatcatgcctgcccaccttcagacaggcgtagatgatgtcaagggcgtcttcttygccwgggctcagaaggttgggctgtgagggctgtacctggtgccctgtggcccccacccacctggattccctgttctttgaagtggcacctaataaagaaataataccctgcygctgcggtcagtgctgtgtgtggctctcctgggaagcagcaagggcccagagatctgagtgtccgggtaggggagacattcaccctaggctttttttccagaagcttccttgaggctagcattctgtaccactcattcttcccaaactaaggaaggccaaggtcaggggagctcaccgggcacctgcagtgcaccaggcacttgtgatatgccattgtgtccatcgcatcattcattcctgcattcagcagcaggtcctgctagtctgtttccaggtgaagctcagagaggtgaagtcacaaacagtgcagactgcttcagaccagaacgagggagagtggggatcatgaggagatggaagtagaatctgcaaggtggtggggaggtgggggtgttatgattgaagcacaatggccgagggaagtgaaagggaaggaactggctccagctccctctcacaactggacttgagttctgcccagctctgcctctggggcctgccattccccatgccacgtgcccaggcagagacctcacctctgtttactgcctccagccagctctgggacctgcccctgccrccacaactgtcttctcctgccctccagcccaccctattcacacaaatgagctgaacaagggcaggtgaggcttggaattgatttattaagcacatcccttgccaccctcccaccttaaaagttttcagtatcaaaagaagctagcgcaggccacccgagtccctgaggttggagtcctagcatagctcccctccctcaaagagggacaaggggtcaggggcagagcaaaaatccagtctgcttcaaccacggagactgcctttgggatggaaagtttctggagctccctccattctattcctgtggggcaggaacatgccagggctgctggtaaatggcaggggtcacctttaccagggcgcaggcatagtgtggcccctgcctgccctggggccaccctggaacagtaagaccctctgggaagggaagaaaccagacccagccataagctttctccccttctccctcaaatcgccccttcctcctccccaaaatcaggctatggcaaaggggctggcagcaggggaatggaggttttggaggggaaggccagccatgcgaaggcaaggagaaaaggaggatggagagagccccagccatccccattttccttcctctgcctccgaggggctgcttctggagggcactgttgtgtggggaccctgtgaggtttgcaggaggcgggcaaaggggcaccagacagggaacatgcacacaggcagcctggccatggagagctcctggctgtccgcccaggtggcgtcttgggcagagctggcgctccacaagtgattattgatggtgacaggattccctcatcctgctccaacctctcaactgtggacacattcaccggcagtcactcatctcacatgcccaccagcacgcgcacacacgttcccctaacccacgctaacacacccaccccctgcacacacacactttgaagccacacctcttccccgacaacacccgtctccacactgcgcacctaggcctgagctcacacacacccaggcccatgctcacggccctgtcacctatgcactcagcctggcccacactcccgacacacggtggcaggctctcaaccagacagcagcacaggatccttgccctgggcttgctggagccctggccctgaaagggagtatggtgaggcctcctgggaacctggctagggcaayggtcagggtgaaactccttcccaatcccagcagcttggtccctcaagatcccatggggagaatcgccgtgaaccttggctggccaaagaacaagcatccagcaccacctagtggtgtcctggaggagggtggggggtggtaacagaaggggaccccctgtatccctaaggcctgtggtccctggtctcccaggtagacagagggcttcaggacccagccaggcagctggggatgtggggaggaggctggtggggaggaaacaggcagctgtcctcccggtagagctaagaacacactcagttccaccccagttcagctccaggaggtagaggggctgcccactctcgagtcccagatgctgggaggccttccctagaacagactccaaggctggtgagggccaacagggggtgggctggccacatgattctgggcccacatccttcatgtccaagttcaagaagttgaaaagagaaaatcatctcaagggttgaggggagaagggaggccagcagggcgggggcaggatccccactggggcagactcgctccaaggtcttcagtccagcttgaacttgtcctctgattccttcagcaggtacaggctgtcatcttccagaaagctgtgggccraaggagtagcccattgaggcacacagctctgacagctcgcatggagacaagggtggggtgcatgcaggcaaggtgggagggggcggatgggcacacagagcccccaatctcccctaaggagtgggcaaggaagggtccaaagaaggtgagcaccaggcagggggcagcacccacctgaaaaagaggacgtggacagggatggtgctgatgtgccagatggcatgggcatccaggacccagaagagcggtgggaagtcaagcagctcgagcagggacagcccctgcagcagcaagaccaccaccacgcacttgcgcacgtgaggcagccgccgctggttccacaggcaccaggccagccaccacaccacgttgaccaggcctgggtgccagtgggggcaggagagactcattccttcggctccttctccccaaggccacccgaaactccatgctctctgaccccaggatcatccttggactctcctcccagcctcctctctctcccacctcaaattcttctccattcctctaccccaagagtctctctagaacctccttctccaggaatggcaccaacctcccactcgcaccccaagctagcacttctgcagatggcccaagccccccagggcctcaccaatagccacgttggccaccaggttgtagccatagtcgaagcggatgaggctcaggtaggagacgtgcacggtcagcatgagcagcaggagagcccggaaggcactgaccacagctgggtgctgcagccccacggtcctgccccaccgtccagggttgctcagagggcaggtggcccatccccagagcagcattccctgaagcatctcctccccccaacattggtgcatggcccctgaagtcactacccctctccccaccaaacaggccacagctgggcagcaagtgctacagctccttgtcaggagccagggcccccagtcctaccccagagtcctcacccaggacagctgatgtgttgggggttggggggcgtaggtgttgggagactagtgaagaaggcccccaggggaaggctgggtgacccctttctgcccccagggttcgattttgcccctgcagccacccaggcaggctcacctgacgcagcacaggtagattgagtgtaggatgacagtggaggcacagaagtagtccattttctgaggacagggaagggtggtgagggaccagcatgaggcttcacggagaggacccgcggggatgggggcatggaggagtggcagagaggggccggggtcctgggcctgcctatcactgtttcactctgactgagtcttgagttcacatcaccatacaagtttttaaaaatgtgcccaggaacaaggctttagggacgctggtggagggttcctgctgaggctccaggacatgaccacgctgcacagaattcagagcacagtgtggagtctgacagccatggggtcacgtcctgtggcaacccttcactggctgggtgcccctaagcatgtggtccccctgtcgaaggctcagctgcctcatcaggcaagaagagcgaatactcatccccacctgatgaggctcactgaggatcaagggcaccaacaggtttaggatgcccaccccatactcctcccagtgctcctcagagggagttggcatgaccctctagagcccctctgcccacttctgggctcctctgggaccaccctgtgcaggagggggagctggaggaatgctcacctctgtgaggtcagtgtccctggtgtggaaractgtggaccagaaccatgcattgagggacacctaaggagggaggggctggtgagcatgctgccccccaccctgacctcaaggcagggacccccatttgctcacatccatttcacctttgggaaggggctctgcgggacaagaaatgtgcttttcctgcccctggagccctctgaacaaacctatgtccctctacccccacccagccagggtccctggggtggacttcctgccaccccaaacccccaaggccacggggggctgcagcctccacaggttccggcctggcctgggaaccagttcsggtatagccaagctccctagttactcaattgctaagacaacagcccccaggggccttgcctcctcctccaaccggcaggtgttgacagcaccacccsvggcccaggggagccagtgacctcagcctctgggggcgggaatgaggtgggtggggtggaggggctcgagccagcttggggtgtgttccaagcagcaggggagggagatcaagcagatcccactggggcacaggctcccaggaggagggtgaaccaagcccagcttcctcctggctgggcctgcccaacccgccagaccagtggctgctcccgagcctgggaggagtagagggcaggactggaggggctgtggtgggccagggcccaggggaatgtttgaggccttcttcctggaaattagctgcgtgragagagcacaaaagttatctagcgaatgagcctaagagcttgtgggcgttggtgctggcactttcttcagggactgctgtgtccacagcaaaggcccaaactgctgaaagcagggtgggctgaagggaagggctgggaaatcgtgacaaccaaaggaacagcaggccaggccgggaatggcctggaggtggggagggatgcgctagggtgggacaggcctggcggagatgaggaaaggccaggaactgctcagttggctccaatgtaccaggaaaactggccaggcaggggacagagggagggggcaagaagctacactctgtctggcactgtagcaggcaggtcagacagtaagatgcattccaaatgcaggtctggggagctcaggagagaatgggaggagaaggggtacaggcggggcagaactgctgcacagccagtcaggttctcggggtgccaagctctggaaggcgcaaggccgcctagtgcacctgtctggcctgggctctgggctgagccttgctgcttctgctcctcttgacctggtcaaagggccctgcccttctcagcccaagcttcccccgggacaaatcatggctcaagtgaaacttcagttcctttccagcctggcgttaggtggtgtggtctagggcaggctgcttccttctttgaggatggccactctgtcccttccaccagacacaaggctctgccctgctgcagccccctccccagagacaggcatggaggctacacaacaggactgaacctggtggcttctcagacactgctcccacagtctgaaaagcttagagtcagcatggggagaggagcaggcttgggctggagacgggacccaggcaatcacatggaccagttctccctggcaggccaggaacagggacatccttagggaggagagtggccctggagccaatgtgggaaggagaagaggaaggcggcagggactggcagccagccaggcctccttgtcacccacagcaggaagggggaggtgagaagaggactgcaggactgagctaagtggctcagaacaccgaaagcagggggtgtgtgtgcgggcaaacatgtgcgtagggccacaggatgggtggggcty

SEQ ID NO: 95471 - DNA, 26476 bp, Homo sapiens
  misc_feature (1)...(26476): n = A,T,C or G
gtgttaaaatattgactccctggccctttgaagaaaaagttggctagtccctgctctagtacatcttcctcacactttatgaatgaagaatcagggccccgggggaggggggcagtatcttgttcaaggcatcatgggagccctgctttctctacacgctcagggtcctgtttccacaggctcaggcctgaagagactgaaagcccccactttttctgtctcttgggttggcccagggttgaaacccaggttccaggctgtgaggaagtccaggacacactgagaggtcatgtgtaggtgttcaggccaacagcacagccaggggctcagctgacagccagcatcaatgaccagatgtatgggtgaggaggtcttcggatgactccaggccaactcctatctgactacagctacaactgcacaaaagagcccgaacgagaaacactggctgagcccagtcaaccctggaaccagaagagatgataatgccatccagccctgagatttgtttggagggtgacgcggccaaggatgacacccactgccccagaggctgggggactggcaggtatatcttagggtttgggggtgggagtgaaggtcatcctgaggagagtcctttttgagtgtgttaaggtgtctgtgtccatgtggacgggctgtcagaatgggctgggggatgcggtcagggaccactcccattcccagggcctgggtgtcctgaccatccatgctaggtctgttccacgttggccacactgttccaggcaagcgcctttggtcacacggactggtctctgagactggtctgatgtgtgtactctcaggagcctggacaggggcagtctcaatccagaaatgacctcttcaatacttggtgtagttccctgtatgaaacgcccaatattatgagccacccaggcctgggtcacctgctgactggctggaggaagtgcatgggaccatgtgaggtcacggcagccccagggtttgcaggtcgtctgcatcctggctcccccgcttacaagctgtttgaccttggtgaggttagatcatcttcctaagcttcagtttcttcagccacacaatgggtataacacttacccttgagggttactgcgattgtcacacaaggcagcatttgcatgggccctgggccatgctagacattcatcaggcactgaagctatgggggagagaagtgaggggcccaggctctggagccagtgggtttaaactccactctaccactaacaagacattattaaaaacttctgtgcgcctccatttcctcatctgtaacatggggataataatagcacctgcctcctggcttgttgagaggatatatgtagtgcttacaacagcacaacacacatatatgggtacttcacaaatacaaatccattcaaggaaaccaaccctggtgccctgggatggccgttggtcagagacacagaagccgaagccagcttaggacaagcggaggggcccaggcctgcccctcggttccgggggcctcacttctgttccagggctgttcagttacctgctcctaggcctgggaggcccagtggacaacagagtgacctcttctccactgatttgatctgaatacattctgccccatgagggcccaaatgagggaactggtatgatattcacagagaggtgacatcacccgctgaagatcacacagcaagtccctgggccacctggatcccggccacagctccaccctgctacctccctctcttaagtaacacattaataagtgtcttaccctcaggccattatctgtgttcccaggccagggaacatttctgaaacacatcaaacattgacaaaaagaggtgtttttctgtccccaggccaggcccttcggcctctgttaaccagtgagtgttctctgttaatcctgagcccagctcctcctacacacaagtacaaacaagggcattgggcatgggagaaacctgtccaccagggccaggaggggacacggaaggttaatgggtcccctcccccaaagcaatgcacacagctggggctcaataagtgctactgggtggtaggaacagagccagctgagggcacaggaagagggatctgctaagcagaggaggcctgacctgggcttcattgggtaaaaccagtcatcataataagtagctggcatttcgggagctcttagttagttccagacactgccctgagcactggacatggtcactcactaacgtttccatgtttcagtatctgtggggtgcatatgttgctctccccagtctacagacaggaagctgcaggcaagaaagatgaagtcatttgcttaagtcacaccattaccaagaggccgagcttggattcacacccagcaccctggctccagacccaagctctcaaccacaatacaagyctgtggagtgggaggggtgaaatacatgagtgaggggtgacttctaggtattggcttggggtggctgtccctttgatggatatgtgggaggagcgcaggtgtcaggtgaggtattggggagaaggtggatgaattgggtttggcaggtgttgagttccagatacctgaggatgctcaggtggaggaggcaggagagaggcggcttatggctctgaagctgggtgatgggggctggagctgctcactccagagtcatcagcgtagaagcgcagcctgggagacacctgagcgatgaaggggcaaggccacagctaaggcaggggaattgatatttagtgtgcaaggattcaaaatgacagcaagaaaagaagtgttttagagactattattattattattattgagacagagtcttactctgttgcccaggctggagtgcaggggtgcaatcatagcttactgtaaccttgaactcctgggctgaagtgatcctccggcctccgccttccgggactcagccaccacaaccagctaacttttaaatttttctgtaaagacagggtgggggagcctccctatattgcccatgctggtcttgaactcctgacctcaagcagtcctcctgctttagcctcccaaagtgctgggattacaggaatcagccaccaaacctggccaaatgctatttttatttattttattttatttatttatttttgagacggagtttttttgtttgtttgtcttttgttttcttttgagacagagtctcgctctgtcgcccaggctggagtaaagtggcgtgatcttggctcactgcaacctccaccccctgggttcaagcaatttcctgcctcagcctcctgagtagtttggattatgggcacctgccaccaagcctggctaatttttttgtatttttagtagagacggggctttaccatgttggccaggctggtctcgaactcctaagctcaggtgatccacccgcctcagcctcccaaagtgctgggattacaggcgtgagccaccgcgcctggccaagtgctatttttaaatgaatgttttctttattttgagggtagataataaatgcacaagatgcaaattcccaaagggtgaaaattgtgtctctcttactctgtcccagttcaccaggtcttctccccagaggcagccactgtccccagtttcttcttttttctttttctttttttttttttttttttgttagagacagggtctcactcactctgttgcccaggctggagtgcagtggcacaatcacagttcactgcagccccagcctcccaggctcaagcaatcttcctacttcagtttcccaagtaactgggactacaggtgtacaccactacgcctgggtaattaaaaaaaaatttttttttgtagagacagggtctcgctatgttgcccaggcttgtctcaaactcctgggctcaagcaatgctcctgactcagcctcccaaagtgctggaattacaaaccatgagccactgcacctggcctgttcccaaagaaacaagaaagatgtttcttgtacatctttccagggatatttaacacacagaaataggtggccaggtgtcgtggctcacgcctgtaatcccagaactttggaagtggatcgctttgagcccaggtgttcgagacaagcccggtcaacataatgaaaccctgtctctacaaaaaatacaaaacattagctgggtgtggtggcacatgcctgtggtcccagctgctcaggaggctgaggcgggaggatcattggagcacaggaggtagaggttgcagtgagccaagattgcaccattgccctccagcctagataacagactgagatcctgtctcaaaaaaaaaaaaaaaaaaaaaaaaaaaaaagaataggcatatactttctcctataaatggtaacatatgcactttgcatcaccctgttttctcactggacagtacatcttggagatcattccacactggtacgcacagagctgcctcactcttttgattgatgcagagtatttcactgtgggaatgaagcatacgtaatgaacagtcccctatgagtggacctttaggttgtttcccatattttactattccaacaatgccacaatgaagagcctttggcagatggcattttgcacatgtgtgaacgcgtctgtaaggtaaattcctaaaagcaaaatttctgggtcaaaaaagatgtgcagtctaaactttgatagctactgccaaactttcttattgaagttgctgatttacactcctaccagcaacgtatgaaagcacctggttccccaatgtattattttttacattggtatcttgctgtaattttaatatgcagttcttttgtgagtcaagttgagcacttttcatcttttgttttttttttttgtttgttttgtttttttttgttttagatggagtctcactctgtcacccaggctggagtgtagtgatgggatctcggctcactgcaacctccatctcctggactcatgagcaattctcctgcctcagcctcctgagtagctggaattacaggcatgtgccaccatgcccacctaatgtttgtatattcagtacagacagagtttcaccatgttggccaggctggtctcaaacttctgacctcaagtgatccgcctgcctcggcctccgaaagtgctgggattacaggcatgagccaccgcgcccagccatacatttaaaggccattttcttttctataaactgtccattgatatcctttgcttattcagataagctgggcatctttgtcttaggaactatttgtgcaataagtaaatcaaccccttgtctataaaatgagttgcaaatatatggtatttttcccggtttgttgtcttatgattttgttaattttttttttttaagataaacataagcctggtatttccaggcacctggtatttccaggcagtctcccatacaagccctaaccaggcttagtttccaagatcagatgcattcaggatggtacggttaatttttcaatggagaattagttgtactcttatggcttctggctttcgcacacatagcgtatcacttatttattgctgcataaagaattactccaaaattgaacggcttagagcaacagcagtcagtgcattatcatctcttatggttccggggttgactgggctcagccagtgattctcctaaaggctctttcttgcagttttagctgtagtcaggtgggagttggcctggagtcacccgaaggcttcctcactcatacctctggtcattgacggtggctgtgagccgggcccctggctgtgctgttggcctgaacacctacacgtgacctctctgtgtgtcctggacttcctcacagcctggaacctgggtttctaccctgggccaacccaagagacagaaaaagtgggggctttcagtctcttaaggcctgagcctgtggaaacaggaccctgagcgtgtagaaaaagcagggctcccatgaggccttggacgggatactgccccctctcccccggggccctgattccccagtggcacgaggcgcacccccycacacacacacaaggacactgtgtagggtcactgttactgtcactccccgagcacgcacagtcaccgctcagccgcaacccggcgctccctctcgcgaagccacaccccctgcgcacgccgcgcgcgacgtctctyccgcccactccagcctggmcccgccccggcccagctacattccsgggccagcttctgtactgccaggtccgggtcggcggctgcactgcggatgagaccggtgcgactcatgaaggtgttcgtcacccgcaggatacccgccgagggtagggtcgcgctcgcccgggcggcagagtaagagcctcgcgcgccgtggaggagggagcagggcggtcccagggaccggagagccgggcggggcgtttgggccttgtggccggctggggcaggcttggagttttggggagtctcggagaaagttctctggggcccagttctcctcttaagacgacgctgggacctgcagttccggctttggagaggggagattgcccctgaggcaaggtccaggctaattctccacgctcccacaggacatgtggggtcagggacatggcggtcactgaccaggcccttggacgtttggcagggggctttgatgactcttcttctttatatttacttatctttttttttttttttttgaracagtctcactctgctgcacaggctggagtgcagkggctcgatcgatcgtggcttactgcagcctcgacttcttgggcccaatcagttctcccacctgagcctcccgagtagctgggactacaggcgcaaacaatcactaccggctaattttctgattttttttttgtagagatgggggtctcactctgttgctcaggctggtctcaaattcctgggctcaagcaatcctcttgcctcagcctcccaaagtgttgggattacaggtgttagtcaccatgactggcctgaggaccctttaatttttaagacagggtctcactctcatccaggctggagtgcagtggcaccattatacctcactgcagcctcaacctcctggactcaagagatacttccacctcagcctcccaagtagctgggactactacaggcatgcactaccatgcctggctaattttttatttttttcaaagacgagggtctcactgtgttgcccaggctggtcctgaactcctgtacgaagggatcctcccacctcagcctcccaaagtgctgggattacaggcatgaaccactgcacctggcccacccttgctaaatggaaccctttttgtgggccaaccttgccaggtgcttcatatacataaacttttaatcctggtagcactgtkaagtcagtattataattcccattgcacagattaaaaactgraggctggacttagggttaagtttcttcccaaagccatgcagctcccaggtggaggagctggggcttgtactcagaagtgtctgactgctgtctgatcactgcatttgatcaggtttgtgtttccaatgttagataggaagaggatgcaatccagcctcagcagccagttctaggggcatatgagattttcaaattttgttcactgcaacaaaacctttgccaaggacccactttgtactgagcaggagaaggtggaaggcagcaaccgcgcccatggtaacagtagctcacgctgtaccctgctcatggggaggtggatgaaaggtggtcagtgccctgggctcagtcaggaggtgcaagtagctatcctgtgtcctgccacatagaggctccacacgtgctgactgtactgaattccatggcaagggccaggaggcaccgtgcatcactgggacaaatatctggttgctgtgagctgccgtggaagcgttgggtggccttgaccttatctttcctggcccagtccaactatgagagttttctatttcatggactccacggacaggaagagatgcaacaggccattgaatccaggccccccacctgaggcacaccctgccccccacgggccttccctgcagttggccgcctgcttggccgcccagcccctgtgaatgtgggaaagctcttctctgtgctgacctgagagctgtccccatgccttcccccttgcagcttaggctctgctggggggcccctcagcccttcacctgtcacctgctgtctcgggacagttctgagaccacccctgcctgaccctgcctcccctcagccagccccgggcagcctgaggccagggccatcagaggccaggattcccagctgggaggggcggggacaggtgtgcggctcctgcttctcctgagggcctccctttccccgcagctgtgaggtggagcagtgggactcggatgagcccatccctgccaaggagctagagcgaggtgtggcgggggcccacggcctgctctgcctcctctccgaccacgtggacaagaggatcctggatgctgcaggtgcacactgggtgggcaggggacttgagggtggcttggccctgtgggcccctcagcctgtgctgctggctcctggctgctctgcagtgctgtctgggttctgagggcgtttcctgcgataccaggcccgagcgggcagatagcttgctctggcacaggcactgcccctccctcctgctgtgaaccccttggcgggggmmcctaggagggcaaagaccgcggtgtggagactgtgggtgtggggaagtgcatccaaggccctgggttctscagccctgccacaaccttgctctgtgacctccagcaagaccctgccccttctgggcgtgtgcgtagtatgagggaggacctagctcagtgccaagccccagcaggatgtctttcctcaaccgcagccacgggtctcagcccatggaagaataaacctccccctgtgaggctgttgtgacagttttgagaaaaggttcagactcagaggctgccagatgggaagggacccttgtgagtcagtgctgagccgccccacrtcctggccttggcctggaagctttgtggtgtcctgcttgcaggagagggtagagagggtcacgtcccagccaccttcttggcactctcagaggtgtccatgggggaggccccagcgtggctaaagaagaccggaggcctcgctgggtggacagtccagtgggtaagagcggggccttggtggcagaggccctgaggtgaacccggctctgcctgtgactgagccaggccacttaacctccctgaactgcagtgtctgaggctgtcaaaggggattattcagagttttaactgaagaacagagatgtcagcctcttattctaagaaaacaataataagcggtgtccccatgatagtccccagtgctgtggctttgagttcctcgaggaaagatactaacaatgcactttctgcacaacaggggccaatctcaaagtcatcagcaccatgtctgtgggcatcgaccacttggctttggatgaaatcaagaagcggtaactgcagcttgggatctggagggggcctagagagaggggtggctatgagagaaagaagagctgttgatttgtttttactgcatatccctcggccattcagggagaatgtgaggtggctgatgatagaatctgtccacatgtgcacaggtcagttacartaaaccccagcagtcagaaacagtgggtaacttctgtgtaggtggcaccctttcacattcattatcttttttgatccccacaacaataccttgaagtagcaaaggcaggtgttattctttctgtttcagatgaggaaattcagaaaggttaagttacttgttcagtccctgaaccctgatcttccatcttcatatccttccaaagtgggagataatctaaataggaatgaggactgcccgtttttgagtgctcatttatagttctgagcttcctggcaggcagatcaaagagggagcaaagtaactccatggaaatgtcccagcagtagacattggtaaatatggttgaggctgatgttaccaccagatgtytgattcgtagtgggatcygagttggctrcaccccagatgtcctgacagataccaccgccgaactcgcagtctccctgctacttaccacctgccgccggttgccggaggccatcgaggaagtgaagaagtaagtgaacgcagaccaggtgcggtggctcacggctgtaatcccagcactttgggaggccaaagtgagcggatcatgaggttaggagttcgagaccagtctggccaacatagtgaaaccccgtctctagtaaaaatacaaaaaaaattagcygggtgtggtggtgggtccctgtaatcccagctacttgggaggctgaggcaggagaatcatgtgaacccaggagacagaggttgcagtgagctgagatcacaccattgcactccagcccaggtgacggtgtgagactccgtctcaaaaaaaaaaagaaaaataagtgaacgcctggcaggaacgttggctctgctcagcactggatcctgatcactgtgccagtccagcccacgcatagtccctgaccccaggtgtgccccattgagtgaggactcagctaaaataaagcacaaagcagagctgcaataagggcagaaagggaagtggtgagagaagaggatgagggaggacaaacaagttctgctggtgggtgagggctggcagggagagtgtggatcagggagggcttcacagaataagtagcaggtgggcgtccgcttgagtcctgaaagctgcaggtccaccatcccttagatcccaaaatctaaaaagctcggacagctgaaagttctttcatactaacaggagactatttaaggcttttatttctcccatttaatgtgactttcctaagttttgctgcagatgtaacacttttaaaacaggctgctgcccagacactgcagagggtgatgtgtggaatctaccacgtgcgccatgctgcctttctaaaggccaaacagttttaaaatctagcctgaaggtttcagatcagggatttcggcctgtatatcaagagttagagttggccgggcacggtggctcacacctgtaaycccagcactttgggaggccgaggcgggcagattgtttgagcctcaggagttggagaacagcttgggcaatgtggcaaaagtctgtctctacaaaaaatacaaaaattaggcaggcgtggtgttacacgcctgtagtcccaactactcgggaggctgaggtgggaggattgcttgaacccaggaggcagaggctgcagtgaaccgagatcatgtcactgtactccagtctgggcgacacagcaagaccctgtctccaaaaaaaaaaaaaaaaaaagttgggggaagcattccatgtgcagatggagggactggcccgagtcaaggtgggaggcgtgcaaacgcaggctctcacagtgcgtggccagcagcgtgggccccggcacggggcatggagcagagtagacagtgctgagtcctgctcactgtcctgtctggggagtcatcacatctactggaggtggctcagggcaggctccatctcttgcccagggcagcagggtgggccctgtggctgtactctttgttgctgccctaaagtgccaagagaacttgttttggaatcataaatcctgagtttgcagcctgttgctctcaactcttccctggttgtgtgacctcaggcaagtcaccctttctggtttgttttcccatctgcaaaacaggatgagagccagtaaggccccttcccgccctcaagttctatgtctctggtggctttaaaggtggagtcgtttctgctgctcatctgcagtgccgagtggcagtgcctcatcccactctcagtccgtgacctggagggtgggtttataccttggaccacagtcagaggtgccgggttctcagcggcccccatcttggtccaaggctgggcctctcacctgcccctctctctcccctcagtggtggctggacctcgtggaagcccctctggctgtgtggctatggactcacgcagagcactgtcggcatcatcgggctggggcgcataggtgaggctcccaccggcccgcttgcccgccccggctctcacagcgtggtttgcatccctggcaccacgtgtctgaaggctgagaagacccacatgctgtcagggcactttgcttgcagtagagatatctctaatgagggatacagctttgtaaaacacaggcaaatacataaataaaccaaagcaggattccttaagaactcaccaggtgataaaagcaagttgccyaagggtcagggggcttcatgattccggctccataaagaacagatgaagactacaaatgtgttggggccgttaggagtggttaccgtgagagagcccattcccccgacacctactccggcttgcgttctggaaggtatgtgactcacaaagccctaactcgggccggagggctcagtgggcagagttgatctgcagttctgcagatgaggcagagacacttttcttccagtggcccttatttggagaagcctggcagaagggcgtgagcctagccaagcagctatctattggtggttctctgtcatcctgcctggtgcaggggtgcgggtgagggtggagagtgtggagaacctgtctagccaacgaacagccctgcctctcactagagagttgcttggaggaacccaacagctttggggcacgttctgagcctgaaaatccaactgtacaaatctgtctcagcagcagcttacatgaaaattgtaagtttggggtgagctggcagtttggcagtgccaccaaaaagtcaaatggggtctgagactgcattcacagaagcagagggtccaggacaaagraggggactgcttgaccaggtgtctccyttgtgaaaacctctccagttctcagaggttaggaaaaacctgagtggctttccaratggcttggmccatgtgaggacagcatcagccagtcacagyctcaggggagctgaggtgctgtctccagatccctggggcagtgtgggctggctgggggctagttacagtggggcagccagccccccacccgctttggaggagacaggagcaggcaactcgggctgtgctgatgaaaagggtctgccctgagggccgctgttccrgaaatgctgggtggtgtccctaccctttgcgggactgggaacgagacatggactctccttgctctagrccaggccattgctcngcgtctgaaaccattcggtgtccagagatttctgtacacagggcgccagcccaggcctgaggaagcagcrgaattccaggcagagtttggtaagtgaagccttgattyccacaggagcctatctgtgcccagttgaraggctgtattttctctcaatggtggcattttcaggcagagggcagragctccaggcatgtccaggggctgctgtctggtagatgtttaatctacctgcccctggacactggcccactcagggagcacagggacttacccaggtcctctccgagccagcagagcagtccagggctcccgtctttcagagtcctttgttaccattccccattgtgggcggagcagcggggatggtggtgggtgtgaggaagggctgggcactttcactgtcttttccttcataaactggcaagcactaccctagcctttgtgtgcgccccttagtccaggcggatccagcacctggcgggtccacagcctggtgagcagatggcaggctggatctcaagcattccccacgcccctgggcactttgggccctgaaggtagttaaagccagagtggtccagatcccactgtgtgtgatttgactttgtgcactcatgagagttgtccaggtagagactcggccttcaggaagcatcttgggagtttctgttagggagtcgggagcaaggggctggtctcccgccatctggttgtccctagcctgggactcagtgcctgatggagtcctgccctccctcagtgtctacccctgagctggctgcccaatctgatttcatcgtcgtggcctgctccttaacacctgcaaccgagggactctgcaacaaggacttcttccagaagatgaaggaaacagctgtgttcatcaacatcagcaggtatcctarggccaccttacccagcaagcctggagaggagccatccccactgctgccatctggagattttcttccccgtgggttgttggtgagaycccaggctgagcttgctggtttccataaaccaaacaaccaactcagaaattcgtgggaatacacgagacctccgtacagggaagaagagccgtcagagtgggcctggcctgtctgcttctcagcagtggcccccacccggcggggcctggcacacagcagcgtggcttcagggagtgttcccagggagcctctgcaggcccattatcctycaccacaaagggctggacttgaggatctgaagggccctctggaggccgcctcccacactgctgagcctggctttgtctggctgtggttcartgatactttgaaccttatgctcctgggcggacagaccctaaaactcacgtggtcgtagctcctcacactgtccctaggggtgccttcaggccactgggcatgtatggaggtcagaccttccttctctgccactccaagcccttcctagctggtgccccttgagcctgtttacatcagtttaggggaagggggattgggtgaggtcatcctgaggactcgtccaccccaaaggtacctgtaattaccaacatttagctacaaaacaggtgacctgggaatggaagagtgaaacatgcaggaccacagggctcgcactgctggctggcagcagtcacagctgccgtgtactgggtgcctgcrtgtacccaggacagcccaggaccgtgtattactcattagtgcacaagtattacttagtgcacaatatmcagtctctagaagatgacttcttgccttcagtcgccgctccctttgatggctgtggttaggggtgtgctcgttcctctgccctggtttagacaggtacctgatagcacactgtggtgcttctcagtgggggtctgggggtcaaccagatcagaaacacttggatggggcctaacacagatgcccttctgggccctgttcatgcagtagagcatgtaagaaagctttaatcctcccaacatgcctgggagttaggtggtattctccttatctcacagagtagataatttgagacacagataattcgaggcacagagaatttgagacacttgcccaaggtcacacagctagaaggaggcagggctggagttctctgagtatataagacttacagacatactgtaagtatacctaagacttactgctttaaaagtcagtgccaagtgagtggaaaaattcattctgtaggttgttctgcctcaaaggtggcctgggcggagggatcttyggggtacccatgtcaccactgtcattcccaggggcgacgtcgtaaaccaggacgacctgtaccaggccttggccagtggtaagattgcagctgctggactggatgtgacgagcccagaaccactgcctacaaaccaccctctcctgaccctgaagaactgtggtaagaactgcactttctgatgcaaactccctgctgccctgcaggaccagtgtttttgagggggtcccaaggggccgggtgtggagctagtgtgagcaggtgttgaacccaaagggacacaccagggaycgtaaatgtttatgttgtcagtgacatgggtgtatgacaggagcagtcctcttgcgcatgctctgctgggtctctgtccctaaaggaacagaatgtaggtgtgagtggatttgtttaaaaaaaaagagtgggccaggcgtggtggctcatgcctgtaatcccagcactttgggaggctgaggtgggtggatcacgaggtcaggggttcgagaccaacctggccgatwtggtgaaaccccatctctactaaaaatacaaaaattagccaggtatggtggtgcatgcctatagtcccagctgtttgggaggctgaggcagaagaatcgcttgaacccaggaggcacaggttgcagtaggccgagattgtgccactgcactccagcctgggtggcagagtgagactccatctccaaaacaacaacaacaacaaagtgggctgactacatgtctccatgtgttacaccacagtgactcgtgtaaaacctgttactataaattgctattaccagtttagctgtgaaaaattaaaagtgtaatgacaatgccaatataactcgtgccagtttttcaagctgttgtttcacaacaaagcccccttctctcttctgctttgtggggctggggccaggcctctgcacaccccatttctgctgtgccagctgcactggcaggccttgtcagcgtgggtgtggaagggcctgctccctcctgccctcccttcctgtctttgggggagtggcagcagcacttcttcatctagcagcaccagttccttcccatagtggctggggaatccagtttgcagtttttccaacacttggtgaaccagccccattgagccctgctcagagacaagagcaacagccagtcagtgcccgtgccaccgaagtctgagttgcagcaccagaagtgcctctggcagttgctacctctgtgctaccacagtgcagtggttctcacatttttttttttttttttttttttgagacagagtctcgctctgtcgcccaggctggagtgcagtggtgcaatctgaactcactgcaacccctgcctcctgggttcaagcgattctcctgcctcagcttcccgagtagctgggattacaggcgtgtaccaccaggcccagccaatttttgtatttttagtagagatggggtttgtccatgttggccaggctggtctcgaattcctgacctcagatggtccacctgcctytgcctcccaaagtgctgggattacaggcatgagtgtccggccaattctcatacttttgagttcgtcagaatcayctggaggagtgactgatcaaacacaggttgctagccccatcccgagagtttctatttcagcaggtctggggtggggtctgacagagtgtgctcctcacggctcccagatgccactgatgctgctggtccagggaccacactttgtggtttgggtttttgttacctgctcagtgagttaacaacttgatgcgtagttaatgattctttatattaagatctgttcaggtagctggtggagtttatgcctccagactaagagtgatcagggccttaggttgtccgggccagtctctgcccttaatttggattctggaatggaaacctaaacaaaaggtcttcagctgccttccccagtgaatgctcccattattgcagcccttggaaactctcccgtccctccccmaccccagcctgcaaggagcactggrtgtgatgtcagggctgtcgcccacagccaggaaaactgccctcccacccccaccctaggtcctggaattcagctcacggcctggggactgcttcaaaaggcaggtcttggtctgaggagagggcagtcagggcatgaagctgcagccgccaccgctgcttctacaaaatctaagcactgggctgcagccatgtcctactgccagcaggaagggaaggatgcaatcatttgtgatgtaaaaagaccatgcagctccaagcaacacagctgatgaccccagtgatccctatggggggagcacggattgaggctgccaaatggagacattaactggaactgcctgtgccttgggggaagggccagcggcccctgtggggaacaattcaarctggacttttcctgcttccactatagtatggagaatgtcaaggggtcagactgtgtagaccaattggggccatgcaggaatgcatgcagaaatacccagatctttgtccccaagaaggtgaggcagaggtagaggaaaagcccgcagaacatgtagaagtagcagctcccactgaggccactgcaaccaaagaggaggaggggtcaagttaatgaaggccataggactccagtccttccaccccttcagagtgacacggaccttttgcaaaatgccatttagtcaccctccaacaaagtgtctttccctctgttgtcctgtaaactgtaatgtacgaaataacatattttgatgatcggggtcttggcctcttgacatatacgctaaaaaaatgggggttgttttatatgtgtcctgtgtaaacctgtcggcaaatatagccaccacttttgaattctcctagatggccctgaattttgccactttgaaataatgtgctactcaatctcagcaaccaaaaaccattatccaggaatgtttcttgtgagtgagcggatttattctgattcattatatgtctgaaacgttggggtggggctgattagggtggctcacgcctataatcccagcactttaggaggccaaggcgggaggatcacctaagaccaagagttcgaatctagcctgggcaacatagtgaaaccccatccctataaaaaataaaaaaytagccatgtgtaatggtatgtacctctagtcctagctgctcaggaggctgaagtgggaggatcacttgagcctaggaggttgaggctgtagtaagctgactatgccatggcactccagcctgggcaacaaagcaagaccctgtctcaaaaactcttctctactagaagaggccaaatagtcagatgcaaatttctccaaacctatcctgaccttgagtatgtaaaggggtactatacttcattcctgacatattttggtttccatgttggcattcagctccgggttttctatttggatggtgaaaatttggaccctgccattcacagtcccttcctaagtgtagggaaaggctggtttttgctgttcattgttattctgaaagctctggtttggggtccatgttcatgctggctctcagtttgatcagatgcaatgttcttgagaggaggggacctaattgttaccagagaggagaagaaactctgtgaattaagtactgaattatggctgggcgcagtggctcacacctgtaatcgcagccctttgggaggctaagacaggagaatcacttgaggccaggagttcaagaccagcctgggcaacaaagaccctattacaataatgataaaatttaaagaagaaaatgtactcaattaaaaggaaacatgatttctacctggaaaaaacccaaaagcagttttatggggtttatttggtaaagatgatgtctcgctatgtggtccaggctggcctcgaactcttgggctcaagcgaaccttgcatctcggcatctggagtaggtgggactacaggaatatgccactgcacccagctgacggttctttgggggcaagtaagttcacttgctctggggtgggatcagagataactgtgctgttcagcatttcattttggagttatttctgtagatcagaaaccttgtggtcatgtggcatcattttcaagggcacatggtacaggtggccagtgctaaactcctatgcattcaccatttttttgtttgagacagagtctccctctgtcatccaggctagagtgcaatggtgcaatctcagcttattgcaacctctgcctcccaggcccaaacaatccttctgcctcaacctcccaagtagcggggactataggtgtgggccactacgcctggctaaatttttgtattttttgtagagacggggttttgccatgttgcccaggctggtctcaaactcctcagctcaagttatctgcctgccttggcctctcaaagtgctgggattacaggcatgagccactgcgcccagccctagaatacaaatctttcatcacattgtgactgggttttagtagcctggaggcccttcactctgttagtctgaacctcagctctgggggagtgtcaagcttagtgaaggtgggagagaaggcaaagcatggaaccatgaggtagtctctctttattcttcttaccggcaaacccaagccatgaaaacagcccagctgaaggctgctgaaccacccttcttatctccctctctctctctctcycctttccagtgattctgccccacattggcagtgccacccacagaacccgcaacaccatgtccttgttggcagctaacaacttgctggctggcctgagaggggagccgakgcctagtgaactcaagctgtagccaaacagtagagatggagggccgggaagcaaaccgtgccctggtattgtcagacacacccaggcttgatttggatccacaggcagagccaagggaaggtgtgattctctgaggaaagagtgattytgatatatgtacttgtcacrttggtgttggacacatttgcgccaaaagtatggtaattctattattaaataattctctgagagaccgtcttggcctgtaaatggggaagctaacaagtggatatggctgggcatggtgacgcacccctatagtcccagcaactcaggaggctgagcgggaaggatcctttgaggccagttcaaggctgcagtgtgctataaccactctttttaaatcgccactacacttaacctgggcaatgtagcaagataccgtttcctgcagtgtgctatgatcactctttaaatcaccactacacttaacctgggcaatgtagcaagacaccgtttcaaaaaaaactttaaaaatacaaagagcatgtttcaaagtcacagcatccaatgatctgcctggctctgcttcccaccccagccctcagccctgggcattttccttattggaacgtgtccaaaccaccttacccctcatcttctctgcccagattccttcacttgtccctcaccaaggacgggacaaacagaacccagttgtgaccatggcacttgaatcttgatacctagaccatcaggaaaattaaggagcacttccagaaaaggagttaactggaagaaatgagaactaggtaaggacgtaactcttattttggtcagaacgattagaggtaggtgggtttaattttaaaattagtttcagcacctacacatattgttccctttgcccattctgtccccccagcccctccctgcccccaggtggatttttttttttttaatcaccaccttacccacttctctccaaggtcaggccacagcactgccattgccaatgccttgctctgtgctcaaggaatcagcttccagctcttcccagcagccaagccaaactggcagatggagtttccaacttgggaggcaggtccagggagcagcacaagattacgcaggccctcagagagcaactgggtagactgaaaagcaaaatctcatgcatgtgcgtagctcaaagacagaaaaggcgggggaaggcagaagggaatgatttgagaggaacgaccaattaactgttaatagaaggtttggtttaaaacaaagtactagtcaaagaagggctggcaaagagatattaccctctttggtttcaaccttaataacgtaaagaaaaagaacacatatttagaggcatgaatatgacaaattttttatttcaaaaatctcaagttgtaaccagcatagcaccactgacatggatgccttgatagaactccttgatagaactttatgatctgttcaccagaaaagattctacatgatcacgccagactataattaaggctaaccaatcaaaattcaggtacccaaaaccagttataatccaggtagaaactacagatcataggaaccctgggactggttttccagggaaccctggaattattttttaagtgctacagcatgtacaaggacactggcccacaagcttgcttctcacacgtakaaactgacagactaagaggtagatgagagattccaggttccatctagcagtggagaggcagggctccagcatgtatcagagataagccccaaaagcaaagtccacttatgcttcagcagaggtaagcgggcaggctcctggcaccacctcctccaaatggaagggaaggagggctgcaccgctctgcctgtgtcactggctcctctccctgggtccaggcagggcctctcattttctccaggctaacccactgtgtcccaaggttaatctcacaagacactggtccctacatcatgtaaagggtggatggggagcctcctaacaccatgtcaacatgactgctaacaaggagccacacacacaactgaatttcacaggacctcatatcctccaatgggctctttcccacatctactcgaaaggaatcgtgggtttccctttgggcttttcttcctgggaatcagtccatgggagatgccaagcgcccctggaacatgaaattatccacacatgtgtaactgcacactctagattaacaggagagaaaacacgctcatttttgtttccagctacacatacttagctttctaaacacaaaaactgaataatttatctgatttatgaatgatggtttggtatgtctaagaaagctatataaaacataaaatgaactcatgttcatgcatgaattaaactgacttcatgagttctagggagacgcattaacctgtgctgttcccctggacgcacacttggcctcatacaggtgccactaacagccctgatggcagtgtcagaggacagcaaggtgaggctggggaagtgaggctgtagggcccagagaggccctagtgcctccaacagtctcagatgctacttgattacttctatgctatgggctgctaactcttacatagcctagaaaatatttacccatgaacactaccatgtttggatttcaaacaactttaaacatttggtatcagattgggggagcaacaaataataaaatttagggtctgtactgttaaaagtatagtatataacagtaataaaacctgtgtggggcatttttggttaatctgtcgtcgaaaacggtaatctaaacctgggagagttgctatatggggaggggagagtgaagaaatggagaacaggcttgtcctcgggtaggatgtgtcagcctagactggccctcaacatctggacggagcaacaggtaaatgtgccatggaagaccccacaaaacatgactccacatcagcagaacaaagacaaacacaagtcttttctgacttcctaacatggaactgtaacatctgtaatacaagttggttaaaatactgctcaaacagcacatagggaaacamtaccttgtcactctctacaagtacacactccatttacaatttggtttttaaaccagaaaaaactgttaaaacatctatccaacagtgatgtattcaaaagtatatacatctaatagtccaagagaatgctcactctggacccagtgtcagcaccaaagtgcagtgtttatgactgcaaatcaggtaaaaataaaaaatacagtactttgaggcctaggactagctcatgatacactttaaagcatttgtggcagacaggtgtgtcctcaaaggccttcctttaagacaggcaccaaatcaccactggttacacataagtgcattttgcatcactatacagggatataatactcccatcagaaggtataggaaatttaaatgctacacagttttacaaaaattgctaaaaaattttttttgcacttcaatttttaaatttttaaatgtgccacttttaatatcaattacaaactactttctgactgcattactcaaccccaaggaagcacctggtttcagggattgcatccctttcccaagacgtgcacttcactcagaaatgcagcagcacaaatactacatgttagttctccggttattagttgctaaactgtttaagagccactgggcagctggaagcctcgaacccaaaggcattaactgcttaccaaaagaaattcagtctgacaactggcctcagcgttgtcttgtaaggacaaacagctagagcaaagtgctgggaagattgctgctctgccagcgcaggcaggtagtctttgagtgcttatacaggtggctggactgactaaacctcttgccacacttcaggcaggcgtaaggcttttcacctgtgtgaacacggatgtgcttcttgcaatctgtcaaagtcagaaaagttttgcagcagattttgcaggmatacttgcgagctccctctacaaccaaaacattgtgctctgataaggccttcttgcactttgacagaacatctgcagatgccctggtcaactgtggagggccaggctgggaaggatggccattttcaaatgaggacgtagctccattcatcattagctgagaactggtagagttttctgggatctgtgagctcctgacggaagttacaactggcattttgggagctatgcggcggtagtaaggaaagttactggctcctccccttggggaacctatcattaccctggagaaggaggagtggaggcccaaaccagacctggaaaagtccatcccaaactgttctcctccttggtagcctgaagtctgcacacacggcaggcccatcacctcctgcataggcctgacgaagtgggagtctgcaggttcactaaatgggttctctacatgggagccaggggcagaggagggcccacctgcaggcccagcctctggactcaacaaatagggggcctcactctccagcctgcagtcactagtggtgtttggaatattatcatcattgttctgatttgcagtaaagttatttcctctgctcttgttaagaaaattcgaaatactaaaagtggacttatgctctaggttatttgtgacttccaaaatatggatatcacctaccctgtctgtgctagactggggatctgaaaaactccgatcactgctttcagggctgaggtctatcttctcggcactgaccacaactccttccacttccacagactcgctgccttctgcttgtgaggtcacatcgctcacttcatcctgaggctcaggtgagctcaggggctcagatttaaccaccactctcatgtgctccttctcaccaaggccaacctcagggttttcacactgaaaactacttttctcaggtgcagcttcctgaycaaaactagtctcaacctgagttgcacgagaggccatggacaactgtgccatgttgccagcactgttatcagactggctgggcacctgggcatcttcttgagtgccaaaagactgatcaaacatgatcgcactatcttcctggttatcagtcattccrtcarctttaggattatccacaattttcagagaatctggtgaaaagaactcctcccgagaatgaacccctgaaggcccattctccggtgtaacatctgaaatggcagactcatctatggagggtcggaggcgctgcctggcccgctcctctgcagactgcttgcgcttatgaaggcgtctcatggggaagggcgtgcgctgatccaggttactgcgcatggaagagctcatgggggctggctgctcctcgccattctggctggaattgagggctgagctcacgatgcttagtcccagctgctgtagcataaaggagcgctgcatgcgggcgctctgctcctgaacgcgctcactggggggagacatgggcagcgtccttgtcgttaagtaatgtttacatgccttaacaacagagttcaaatgcaggtgagaggctgccaataagacatccattacattgctctcccccagcatgagggtggaggtatacatcatgtcaatcagtgcagcaaaggcctctgctgtcaccacctcgctatccagctggatcatgttcatggtctgatctccttctgccactgagaacagggctcggaaatgcgtrctgcatgctgccagcacggagcggtgggctttaaagtgtctattccccactacaatgacacaatcacagagctggccatgaagtctctggtagttcagctgctggaagatttgttcaaagtgaccaggaaaatccatgatcctacagaaaaacaaagaaagaaaatgttaagacctagaaaagcttcaaagtcagaacacaaagggtatgatgaaaagagtggaatggatggccaagcttggacctttgaagcccgtgatatctctgataatgggcacatacactaagagcttgtcatataagaagcaaatggcaattcagccatcagcccaggaggcatgcacacatgtgggcctagctaccgacaggctcccctttactcttcatatgagccatgtataacactaagggtctaaattagtaaagaccagtgtgtgagtgatggcatatctatcccacagaagtttgttagaattctgcattccctaaggatgaggaatgaataccaagaaattccaaagtcttaggaaccctaaataagtgaaaagggcaaatcaatattagtgtggaagatttccag

SEQ ID NO: 95472 - DNA, 54316 bp, Homo sapiens
ttactaaaggaccatttacagaagtataggcaggatttactaagagccacaagggatggtgcagtactccagggctggtaatagtacagagctgttaccatcccaggcctgaaggggaaaaggggagagcaggtactggaattctgcaagagagaaaaattgcagagacctacctgataggagctacagcctttggtagagggacagagccaacccacagcaactcagtagggagctatcctcagaggaataaaaacctctgacctcactctcctcctgccctctgatctcctgccagtgctcctcattagtaaaccctactggaagctagagtcttggagcctgctgatatagttcatgcagtcagccttccagggcacagaacagggtgaagagaaacagcagggacaaatggacgatgtctagcaccttgctgctcaatctggggttcttggaccagcagcactggtatcaccagggagcttgttagaaatgtggcatcttgggcccacaccagacctgcttaaccagatctagcatttcaacaggatccccaggtgactcaccataccatacattaaagtttgtgaagcacagatccagcacatctttctatgcaagtatagctatagccttattgtttatgaattctcttccagcctttttttttttccattggtccctgtgttggtttggatcctctaagaatcagatgcctagatgtttgtttgtttgtttgttttctgggaaaaatacctacaaaggacaaagagggaaagtgtgtaatcccagcattttgggaggccgagatgggtggaccacttgaggtcaggagtttgagaccagcctggccaacatggtgaaaccccatctatactacaataccaaaaaaattagccaggtgtggtggtgcgtgcctttaatcccagctacttggtaggctgaggcatgagaatcgctggaacctgggaggcggaggttgcagtgagcagagatcacacctctgcactccagcctgggcgacagagtgagactccgtctcaaaaaaaaaaaaaaaaaaaaaaagagggaaaggggaaagtcggggaaaagggatggggagccctcagaccatgatgcaggtctgatacttgagaaaggagaatgggaagtgacgagggaaagtctcagccaggcagatgggggattcccaagcacgggttgtgtcctatatcatgcagatgtggccaggttctggtaccacaccatgctcggtcactgactgggagtagccagaggataccacaaaggatccaaaggcatagccactgggagctggcagtcaaccgtgtttcccctaaaagtttctcccaaagggtaatctgagcaatgcacctcatttccaacacaattcctttcaaccaacttttttaaattaaaattttttcttaattttgaattttttaggcatggtatcttgctttattgcccaggctggagtgtagaggctattcacagacaccatcgtggtgcactgcagcttcaaattcctgggctccagtgatctttctgcctcagcctcctgagtagctgggactataggtgtgtgccacggtacyaggctcagccagcatttactaaataccttctgtgtgctaggcattatgtgtgttgaatgatagaaacatggcctcatggctcccaggaaatcccacatgactgcagaacagtggggtctatgagttttcatcgtcaattcaaaggaagatatcacagtttggaggatgccactgacagcttcatggcagagcttggctacaagttgggcagaaatgatgggtggggtctaggtcgttgtaggaaaaaggaggaaacatattggaaggagagagcagggggacaggaggaccacagactgacagagtggattaggcaggagataaggaaggcttagaagtaaaataatctcgaaagagtacaatatttactttaaatgtcttttttttcctaataaggtaacgattgttttaaagaattctgatgttgtagaaatatagaatgtaaactccttgagatcaatggctttggatattgtttacctcaaatccccagaatctagcacactgactcccagatggtaggtgatcaataaatatttgttgaaaaaaaaacaaataaatggaacaaaagtgaaaggaccacagaatctcacccatcagaagtaaatataatatagttaatggtttggtaaatattcctttagattttttcccctttcatatgttaatatatattattttacaaaaataggatcatactattcatatagctccacgacttgcttctcttttctttacaatgcatcttgaacacatgtgtatgttaaatgcctacaactaactcatgcttgcaaatagcactgtggtatattatggtattgtacggatgtgcaatattttattttataatctcttgatggaaatttggattgtttccaactttttgcttttatatacaatactgccataagcttccttgtatgcatatcttttgagcacttacgagtctatgtttgttggatagattcctagatgtggaattgcaaaatcaaaaagatgttaatattaacatttctaataaatgttgcctaattgctttccaaaaggttatactagtttgcattcctaccaacagtggatgagagtgttttttcacatccttgccaacactggaattaatagccattttcatttttgccagtctgataggtgaaaaaatatttcagggtaggtttattttgtatgtattttagagagatcgagcatattttcatacttttataaactatttatatccttttgggtgggaactgtctatttaaatcctttgaccatttttatttctgtttgttctctttatttccctattgattcacatactgggtaaatgtcatctgcaaatatctctttctgacttgccttttgtttctggactttgtattatactggaagccttacagaattcaaaatttttatatagtcacatttagaaatattttccatatggtctctggtttttctcattcaatacttttataattaaattccttcccttcccttccttccttccttcctttttttgcttatttactrtggcatcttcagatcatttggaatttattttgatgtaaagtgtgatgttgggacttgatttgaattttttccaaatggttatcaagttgtcccaattattacttgaattaggcacatgttccccactaatatttgaaataccacatctaccatagatcatattaaactctaaaaggaatgtaataactcctatgaagagagctaatatgacaaattaaaagcatcttctagagatatctacttgttggtgagcagccgatgacataacatggtactgttagtgaacagataagccccctaaaaatagcaataaacccaagggctttacctctgttgaaaagatgctagatttccaacaagctcccaggtggtaccaatgcttctggtctaaatatcatacttcactcagcaaggtgctggacatcttccctttgccttactgacactctctccactctgttttgtgccccgggaggctgactgtgcagactgtatcactcaatcttctcaacaaccctgttcaggtggtgctatcattagatcaccatttaatagatgagcaaattgagccgagataagtaaagcaacttgcctgaggtcacactgcaattcgtgatggggctgggttgagctcaggcaagtgggctccaaggttgtgttccgacctcctaagctaagctgcctttgcatctcattgcagcctgcccaacagtgagtggtgtggtgggaaatcctggactgtgagtcaggagacccagatacaaatcctccctctaccgcttgcatgttgtgtaaccttgggcaagttgcttcacttcttgagcctacatattctcatctgtcaaccttgcaaggttgtcatagggtgaaatgagaaagtacatgaaaaagaaagtccagcagtttacagcacacagtgcgtgctcagtaaacaatagcttttatctgttacctggggcttaagtccatgtcttgtaaggcctaattgcatttctcttttctctgtatctgaacctctattgagaagcattccaatttggcaagcggatccaagacattatgaattgtaatccttgtctsttttctaatctgaccgcagatcttaaatgtgttgggtgtctgaacagaggccaaagggctcaggtccagacctacctaacacaaccgccttctggcattaaccagcagcctccattctgcgtgggaagcaggcggggccctgagcactgtgggaagagccacttccctctagtctaatattagcagcaggttgtcctgagtgggagctgctttgcatggttcatcccaaaacccacccccctcctgcaacctgagggagatttcctctggggataccagtagccaaaggctgtatgaagacaacagcaagtcagattctacctctacctgagccgccaagttcaaggtcctctccccaccctgtgtctcagaccccgcatttatcaatgagataattggaccagatttgtgctttttaaactttctgggcttctggtctccttgagaatatttgataaaaagctttggaccaacttcccatggtaaaacaaacaacaacaaatagagcttacactctatccttctacaggggatacagaatgattcttttccctgagctagacaccagcagagggagttccagattaatttaagatatgatttgaaatctctgctatcacttttacattcagatatctgtgtagacattacttcatcagagaagctttccaaaacccccaaactagatcaagttctactattctaagcccttttagcgccctgtaattcttcttcaaaatacttaacacaattctaattatctttttaatatttgtctactccattagacttacttcgtccctggcagctcaaggctcccacagcagtgatctcatgaacagggcggcagcttcatggccttttttggttgttgtttaatagaaacaggatctcgctttgtcatccaggctgcagcgcagtggcgcatagttcacggtaacctccaattcctgggctcacacaatcctcctgcttcagcatcctgagtagctggcactataggcacgtgccaccatgcatggctaattctgaaatttttctgtagagatgggagtcttgctatgttgaccagtctcgttttaagctcctggcttcaagtgatcctcctatctcggcctgggattacaggtgtgaactatcatgtacagccttcatggccttttgctcctagcctcagaggtcacagagctatcacgaggcgagccaggcgagggtttgctattcaaggactccaaagagtatggcagaggctgggcctgcagaagtcagtggggcagcgtggtgtctgttgatctcatcgcacctccatctcctcatctgtaaaagggagctcgtaatcctagttgatggttgttttattggactgtgtaaagatcagatgagataatggcagtagaattcataacaccctgcagggtgtattcagccaacacttagcgcctacaatatgccaggcgctaagggttttaccaccactatctctttaataatgcaccatagcccaagaaggaagatgcaagtctcagccagcccacttgaagaccctgccgaaatgagccaccccgggggctgcgcttgggctggcgcggggctggacggaaagggggcggcgcgcaggtggggcgggccgggggcggggcggcacggcggttccgggatccgggtcctggcctccaccgccgccttggggcgcgcagatcgctggctgcagttggcgggcgcatgtgggggcgcacggcgcggcggcgctgcccgcgggaactgcggcgcggccgggaggcgctgttggtgctcctggcgctactggcgttggccgggctgggctcggtgctgcgggcgcagcgtggggccggggccggggctgccgagccgggacccccgcgcaccccgcgccccgggcggcgcgagccggtcatgccgcggccgccggtgccggcgaacgcgctgggcgcgcggggcgaggcggtgcggctgcagctgcagggcgaggagctgcggctgcaggaggagagcgtgcggctgcaccagattaacatctacctcagcgaccgcatctcactgcaccgccgcctgcccgagcgctggaacccgctgtgagtgcacagctctggggaggaagcccgccctcagagccccgggcctcagtttctccatcagagcagtggcagggcggggagctggggtctccaggatggcgcgtcttattgagtctttctccgaagacgatagtgtaagagctcacatgggggcggggaggcaagaaagtaaaaaagacgaaagtagaaaaaaaattaccagaaattggcaagtctgttagtgatctcttagctcccttctccttgagaagttatcatctccctgaaaaggtgagggtcagggctaagcagaagggtttaaggcgaggaccccccagcacccaaaggacaaccccgctctgcccgcctcgcagtgcctccgcgaaactgacaactcctccgggcggtgaccggctccattcattctctgtgtgtgccagggcctaagggacaaacaagatgcgagggagcgccccacaggtgaagcgaaagatggctgtaaggccccctcagcgctagaaagcctccttgtgctctccctgggcattggatttctgagctttgggtggaggaaggcgggaaggggcacggggtgggaagggctccttctggccgtgatccaccccagctcactcctgtgggtggtgctggactggagccagcgtggtcagaggcctagttcctgttggagctactggctgggcaggttgcgcccctgcctaggtggggatccagggcacacgctggcagcaggaggaaggacaggtggctgctgccacctttgccgctgggcctcccgggctctcactttttcttcgargtgtcagggatcttccaagtccttttttgagccccttccttacagactttgaggaaaagaggactcagagagggggttcccattggagctggtggtggcagcctgccgtgtgcaccaggcacctgccactcctctccccttcaagccattcytgctttacaggtgtggaaataggttcggaaaggataggtgacccacccaaggcccctcagctggaatgtggtaggactggtctggagggactatggcccttctggcccacttggcaccatgctgatctcaggattttaggggcctgctccatggtaccttggccagagagaccatgaatgatggaatgaggatgccccacctctgccccactgtttccactgtcttccctgttttggggatctcctcatgcctagccycatgcttctgcctgaggcatttttcactgttagtctttttgaataaaactttgttgggattgatagtagttcctccactcaccagcctaacrcatgtttagctcctcgaaaccccgagggygcccgctgaggcaaggtggaggggaagctttcaggttatacccagcttcagattaaatccagcccaggggagataaaatcctggttcttttgctcgtcacttctgtgatctctggcaagctgcttagcctctcagagccttggtttcccttcgtttgcgaaataggaaactcataaaagtgagtctccatgcattctacataaaagtgagtggaaagaacacaacttaggaattaataaagcatcaatacctgggagcacactgtgtgcttaaatcttagttttttcacctttccctgttgccaagaatgtactcaagaggttgcttttgagagtcatccagggattggttgtagtttttctttcctggatccaacttcctttattgtcgcaggttgtgaatatctctttgaaacactgtggacaatctgtggggcttatggtaacctgtctccatggtgacgcagctgccctgtgtcctctcaggatttgcttgtagatcctgctgttgcattgaccctggaagttaagccaaacccagcatgataaggagtgtgaatgcctcctgcttctaattcctgcagcaaggcctgttgggttattcttacccagccagagagaaaggtgagcctgagctgtgtgggtctctgttgggccaggctttgagatgtaacttcagagtggtcagtagggtcagggtattttgtggcatctcacttttattacagttcatccaggagctaatcagggtcttgagattttgcctgagaaacctgaatggcagatcataagttcacagtgtgggtatggggttctctgcgagtctaataaacagagggataatgagggtccttgaatgttgcaggagggagggccctgagggaggagcatctagtctaaccagagaggaaaagccacacccccaggtcacatagcacatctcaggcagagccacagtccatatctgttactcgttcctccctttttgggtggggatgattatttctatgtttattttaattatgaaagcaatgcatattcactctagaaatgttggcatgcacagagaaacagaaaaggaaaaaaatgaaaatccccaataaacctaccactcagggagaaccattgttaacattttgctgtgcctcctagacttttaatgaaagtctttactctgcagtgccttttatcagaggaaaggagttgggaatgactaagggaccacttggtttgactcttcctggtgtcagcagggtgtggcactgtgtctgccttcttgaagaaggccagaccactaaaaagacattttagagtactggtcctaattctgtgagagccagtatagacctgggcccctctatgaatctaataatttacatgccagtggattcgagtatagttttgttagttacagcactgaattgaagaggaggctaatgatgactaggaatccttccttgcatggtaacatagtaagtattaatatatattaatataaataagtatagtaagtaagtcagtaagcatagtagtatagtatgactagcatctcagcaaagaaggtgaatttttactctgagatgatagcgggtcaaagtggggagacagatagttgggtgtgtggccctggggaactttaaaaaatatattgatgccaggaatcttccccaaaacaatgaaatcagaatatctgtggctaggacctaggctgaatctgatatgcaaccacgggtgaaagctactggcctagagcctgtggatttctgagtcagaagatttagggtgagtgttttggagggtgtggagaataccagaactagagaaagtaaggattaataacaggtcaaatgtagttcaagccagtgatgacatcatagtcaactgagtggtgtgtcacaaggaaatggttattagtaatgttgtaccaaaatttgcaaaaagttttagtttccatagaatacggggaacttgagatgatcactgtaacatcattctcatttgcattctgatatttagtagaagagagagtggagtaacagacagtgccctcagggctggacatttcttcaggtctatctatgacaggaatcccatatgtgtgaacaccagccattctctaccagggcagaagaactgtgaaccattggtcaaggaaagcatggtgtttttatttcttgacttgctctggttttaggcttgttaatactataattgcagatgtgtgtctgagttcaggggtcaggatttgggtgctgggatggcaaagagtctcgaagtcgttctttttttttttttttttgagatggagtcttgctatgttgcccaggctggagtacaatggtgcgatcttggctcactgcaacctccacctcctgggttcaagccattctcctgcctcagcctcccgagtagctgggattataggcaagcgccaccacacccagctaatttttgtatttttagtagacacggggtttcactatgttggccaggctggtctcagactcctgacctcaggagatctgcccgtgttggcctcccaaagtgctgggattataggcgtgagccaccatgcccagcctcaaagtggttctaaacaggtaattaagcaaaagtatgtcttgctagggttgcagaagggagtaggacattagactgatgtttattttgtttccccaacaaagttgtggatattttatgaattcttattagatccatcttgagaacatcagagtggcattctttcttgagtcagtactccagtacttcaaatccacagaacatgttcaatttcggttagtattttcctgatacctttttctttcactcattctgtgtccatatgtttttggtgtgtctttgaatagtatgttgctcgattttgtgttgtcattaaaaaaaaatccaggccaggagtggtggctcacgcctataatctcaacactttggaaggccgaggtgggtggatcacttgaggtcaggagttcgagattagcctggccaacatggtgaaaacctgtctgtactaaaaatagaaaaattagctgggcgtggtggtgggtgtctgtagtcccagctacttgggaggctgaggcaggagaattacttgaacccaggaggctggaggttgcagtgagccaagattgcaccactgtactccagcctgggcgacagaacaagactccatttaaaaagaaaaatccaaactgacaatcattaacttttaacaagatagttatatccacttacatttattgtgcttactgatgcttttggatttgatagtgctgtcttattttatgttttcatttgttatgcttttttggtgttttccccctcttttttcctactgctttttgagtcgatagaggcttttcccctcattccatttttttcctctctactaatttagtagttatattatctatttctaaccttagtggtaaattttaaagtacatatttaactcaacaaagtctaaaattaaatattaactatggaccatagaatgctttagtattgatcatcttctctcctaatttgtatgccattttgctccaatattttaattctgtcttgcttttaaaccaacaaattagaatagctaaaaatgcagtatttatttgttcagatttatccacaagtttaccattttctctgctcactattctttcctgagtcagagacctttctgggattcttctccttcttcctgaaatacatcatgtattaattgctgtagagaggtctattgttagtcctcagttttctttatctgaaaatgtttttattttgctcttgttcatgaaagttttgctgggtatataattctacattggtagtttgacatttgaaggtattattcccttgtcatctggtttgcaccattgctatgagatgcctacagtgacccagatctctctgtcattcttgtttctttgtcattcatttgaggtcttcttttatttaagcatattaagcatacttattttatactctatgtctggtaattatgttatctagattagtgttttcttgttgttccttcatgaagaagacttcttttactttcctgtcggctaagccatccatttaaaagattttttttttttttgagatggagttttgctcttgttgcccaggctggagtgcaatggtgcgatctcagctcactgcaacctccacctcctgggttcaagtgattcttctgcctcagcttctccctagtagctgggattataggcgcctgccaccatgccctgctaatttttgtatttttagtagaaacggggtttcaccatgttggtcaggctggtcttgaactcctgaccttaggtgatccacctaccttggcctctcaaagtgctgggattacgggtgtgagccacagcgcccagccaagagatttaaaaaaaaaaaactttttatcaagattttttgggtgtatataccaggagtgtttccctagacatcttagtcttccatgttgccagaagtagaagtcctatattcactttktaaaaataattattttctacactagacaggattcttttggttaaaagtaactgaaagcccaatgcaaactgccttaaatataaaagaaaatatattgggttctattatagaaaagtctgggatgagaactgagttcaggttattctgggccctggattcagggactcaattgatgtcatcacgaaattattgattggtcaggcctgaggcatgtaaccttcccaggggtaggggtgtgtgtctgtgtgtctctgtgtgtatatgcatgtgcttgtgtatgttcagccctccacaaaccacatagactgagaattggaaaaggttggctcttgaaagggaaatcaagatgcagtgtacagtgaagaaaggagaaaggattctaggcaggtaagacacaaaaatgtacatcacgatctccttggccttttctacagaggatatgatttgattttttttaaaagacatttatgtgataaccttaatataaagataaaagaagatcaggaggggctgggtgcagtgggtcatgcctgtaatcccagaactttaggaggccaaggagggcggatcacttgaggtcaggagttcgagaccagccctgtccaaaatggcgaaaccacgtctttactaaaaatacaaaaattagccaggcatggtggcggacacctgtaatcccagctacttgggaggctgaggcaggagaattgcctgaacctgggaggcagaggtggcagtgagccaagatcccaccactgcactccagcctgggtgaaaaaaaaaaaaaggaagatcaagaggcatttactgtatccattaattcattcatatccatataataagtaaatattctaccagcagagattattgtagtccctacccagtagggttgttaggaaggctacatgaagtaatgtgtataaaatgcttatatggtgcctctcctgtattaagcactcaacaaatggtactgttactaccaggtaaagtacaaggcgtgctgaaaatacagagacaaacacagctcagtctctgcccttacaaagcacatgcaatataccagaaacttagggaaatgattgtgtgctgtgatgtagcattaaatccagttctgagcttccttttgtcctcaaggcaaaagtggaaccttaaagtgatccatagctgtctttgtatgatcaaaagatgcacagctttttattagtcaggaaaaggagaaagtgtttttttctggaagcaaacttaaagacatttcaaaaagatatacagacgatctccgatttaagatcgtttgacttaagatttttcaactctatcatagtacccattgcaaccaacctggttttcacttttggtacatatttggtaaattatatgaggtatccaatactttattatacagtagatttgtgttagatgattttgcccaactatagactaatggaagtgttctgagcacatttaagatagactaggctaggctgtggtgttcmgtaggttaggtgtattaaatgcattttctacttagaatgttttcaacttacgatgagtttattgggatgtaaccccaccgtaagtcaaggggcattggtattgaacctcataaaacagaatgcctttaggagatgttttcaaaaaagaaacagaaactataccaggacaagaaaaagagaaagggcagagtattaaattattgctcaatgaaggcatttgctgtgaggaactaaagaaatatgatctaatcttttaaaaataatatttctttgtgattataaaaattatagatgttcattttaggacaattttagaatgcacaaaaatataaaaagtaagaatcagcaataatctcacttcttagagatcaccattgataacattttggcatatttctttctattgtttattgtttatgcgtgaacgcgctcacatacacgttgttgtttctagaattggctatctgtagatttctatcctgcctttttgatttaacattatagtgtgaccattctcctttatcattaaatattctctaaaaaatgttattttgttgttttacgtggtgcctctcatgtagtaaacactcaacaaagggtactgttattaccaggtaaagtacaaggcgtgctgaaaatacatggccatgatttcctcatgcagccatactatactatattttcttcttgttcgacattgaaattgtttgcaactttttgctattataaataatgttacaaagaaaaatttttacaacaagcctccttcagggtattctgactatttacttaggcaagaaatgtttatgtatgttgatatgagatcaaagaaaagaggaacattttaaagctctgaatattaattgaaaaattggcacccagccttcttgtgatttagatggcacaaatgaagagcccacctagacattctagaatggtggccctaggctattggttttagtggaaacacattaaaaaaagaaaaaaaaaaaaaaagcagggctgacaagagaagaaataaattttcatccaaaatactaaggatgtgatttcagactaaaggattgttctctacattgaatgcacctcactttgaaaacctcacttcaccgtccttattgtcaattatttctcttgaacttgtgcatgtttgaaacaaagttttagcagcatcttaagaaaaaatatttattttaggtttcacagaaacacttttgtttttcatgtagtgtaagcaattaactttttttttttttttttgagtcaggatctggctctgtcacccaggctggagtgcaatggcgccatctcagctcactgccacccccgcctccctgactcaaaccatccttccacctcagcctcctgagtagctgggactacaggtgtgtgccaccatgtccagctaattttttttttttttttttttttgagacacagtcttgctctgttgcccaggctggagtgcagtggcccctgatctcggctcactgcaagctctgccttccgggttcatgccattctcctgcctcagcctcccaagtagctgggactacaggcaccagccaccacgcctggctaattttttgtatttttttagtagagacggggtttcaccttgttagccaggatggtcttgatctcctgacctcgtgattcacccgcctcggcctcccgaagtgctgggattacaggcgtgrgccactgtgcccagcccagctaatttttgtatttttggtagagacaggtttttgccatgttgcccaggctgatctccaactcctgggctcaagcgatcctcccaccttggcctctcaaaatgctgggattacaggtgtgagctaccgcgcctagcctcgcggttaattctttctgaggctcctggtgagctacaactcaacacaatctagcttttctatgcatcttgtctagtattcaggggcttaataatgaagacgcagttattaatatttttataatacacacacatatgttttccatttgctataacatgtatttgttggaggggggatgtttctttttgtttttttgttttgttttgtttgtttttgagatggagttttgctcttgttgcccaggctggagtgcaatggcgcgatcttggctcactgcaacctccgcctcccaggttcaagtgattctcctgcctcagcctccggagtagctgggactacaggtgcccaccaccacgttctgctaatttttgtatttttagtagagacggggtttcactatgttggtcaggctggtctagaactcctgaccttgtgatccacccgcctcagcctcccaaagtgctgagattacaggcatgagccactgcacccggcccagagtgaggatgttttggtagatatgagaaataatgagattgaggagggcatttgtaagggccactaaaattgagctacatagctatagatcagaatagacttggtgtttggatgtgtccacaacattggacctttttttcctctttttatattaaagttttaatttggaaaaatttaaacctggagaaaatttatgacacaccagcataacaaacttctataaatcctccacctagatccacccattattgttttggcccatttaatcactttttctctttctgtatgtctactataatattatatacatttgagagtaagttatagaaataacagttctttacctgtctctacttcagcatgtattttcaaagaacaaagacattctctcatgataccatgatataatatcaagtccagaatatttatccaatatcggatgtctatagctgtcccaacttattattwttttttttttagaygaagtctcgctctgttgcccagtctggagtgcaatggtgctatcttggctgactgcaacctccgccccccgggttcaagccattctcctgcctcagcctcctgagtagctgggattacaggcaggcgccgccatgcccggctaatttttttgtatttttagtagagatggggtttcgccacgttggtcaggcttgtctcgaactcctgacctcaggtcatctgccggcctcggccttccaaagtgctgggattacaggtgtgagccaccacacctggccagctgtcccaacttttatagcaagatttttccttcctaatctagtatctaagcaagaatcaggtgtgacactttaatcaggccattgctgtgcctctttagcctcactcagtcgggaacagttcctcagtctctcatggtctgttatgacgttgacatttttgaagagtaaagacccgttggtttataaaatgtytcagtttgggtctgtcagacactttctttgtgatttattttatggtatgtattactgcaaaatttagtggcttaaaatagcaataaacacttgttatttcacatagtttctatggactaggaatttaggagtagcttaactgggtggttctgacttggaatctctcttgagattatagccaagatgtcacttgggactttgatcccctgaaggcataattgggtggggctggaggttctgattccaaaatggctcattcacgtggctggaaagattgtactggctgttggcaggaagtgtcagttgcttgccacatagactcctccatagggctgcttgagtatcctcacaacatggcagccggctttctccagaatggatgataccttccattgaggaaacaagaggaatcctcaatgttttatgatgtagtcttggaagtcacatactgtttctcctgcwtttcatgtgtggtggttttaaaatatatccacaaattctttgatagcctctgtctaagagatggagccgcattctcctccccttgaatgtggaccaggctcccttctctggagcacaaagccttccacggggtcagtgctaagttaactacttgcatgagttgaaagcctatggtgtctggggattcggctcctggctggctaggtgctggtggggatgcccagtggcttcacaacaccagagctttcatgcttccagcctgggctgaccttttctcaagtgcccagagcagggcctcctgatgcagccaggatgagtatataaagctgactgagaacagccagcccctatcagagattctcagataagcctgttcacagctgaagggaaatcatcccagtgacagcagagcaaggccactgccagggagccttggaacttgctgtagaggctgtcctggcattaggaagagggacctagaactcattccagggaagaggaccctggaccccgagaaggagaagagtaattgtccttgtcttggtaggagggaaggccaggtggggagatgtgatacagggatctttagattcagatggcccacctgagcctcctgttgggtagaaggaacaagccagaaccttgcaacaagatccctggacacaaagatctcagcccagtacatactagcaggtgctctgtgaactgaccaagtcactctacctttcttagcctttaacgtgggagcaataaatgctaacataggaagtggttttgaaggtaaaatgaagtactacatgtcatcaattcagaggcacatttttttcccacatttcaacatttctaaaattagcatgtgtcttaaaaatcaatgcatcttaccattatgccaggtagcacttgtctttttttccccccaggttttaagtttataggtacatgtgcaggatatacaggtttgttacataggtaaacgtgtgccatggttgtttgttgtacagatcatctcatcacctaggtattaagcccagcatgcattagctattcttcctgatactctccctcctcccacccccgacgacaggccccagtgtgtgttgttccactccatgtgtccatgtgttctcataattcagttctcacttaaaagtgagaacatgtggtatttggttttctgttcctgcattagtttgctgaggatgatggcttctagctccatccrtgtccttgcaaaggacataatctcattcctttttatagctgcatagcattccgtggtctacatatataccacattttctttatccagtctatcattgatgggcatttaggttgagtccatgtctttgctattgtgaatagtacagcaatgaacatgcgcgtgcatgtatctttataatagaatgatttttattccattgggtgtgtacccagtaatgggattgctgggtcaaatggcatttctgcctctaggtctttgaggaatcgccacactcttttccacaatgrttgaactaatttacactcccaacaacagtgtaaaagctttcctctttctccacaaccttgcyagcatctgttgtttyttgactttttaataatagccattttgacgggtgtgggattgtatctcttcttattgrttcattaaagaatgtcgtgtcttccaacccagggctgcttaactttgttgaaatactgtagactggagcacaaaggtaattttctaaggtatgacaaaaatactatgcttattaaaaaagagtccttacctgttagagacacatatcgaactatttttggatgctacagtatgctggattttctttagaaataatctggggcagagggagtggtgttgacacagatgaatcaagagtacagtggcacgatctaggctcactacaacctccatctcctggggttcaagtgatgctcatgcctcagctccctgagtagctgaggttataggcgtgtgccatcatgcccggctaatttttgtatttttagtagagatggagtttcaccatgttggtcaggctggtctcgaactcctggcctcaagtgatctgccggcctcagcctctgaaagtgctgggattacaggcatgagccatcatgcccggccctgttctgcttttttaatgttgaaatttctggccaggcgcggtggctcacacctgtaatcccagcactttgggaggccgaggtgggcggatcacaaggtcaggagattgagaccatcctggctaacatggtgaaacaccgtctctactaaaaatacaaaaacaaaattagccgggtgtggtggcaggcacttgtagtcccagctactcaggaggctgaggtgggagaatggcatgaacccgggaggcagagcttgcagtgagccgagatcgtgccaccgcactccagcctgggcaacagagcgagactccatctcaaaaaaaaaaaaagaaagaaatttctaatagtaaaataaaagaggaaaaaacaaatacttttgtatgctaagggctcttccctgacttttcatggggttcatcattcaggtctcatcctaaatgtcacttcctctaagtgcccctcccagattacctgtcctatagttgctctccttccccctccccactcctctgcttttcattttcatagtttcaaagttgttctctttcatcactctcctttccattttccatagcacaatcactttctgtaattcctgatttgtttgtttagttgattactgtccccctgaatatgagctgcatgggagcaggggcctggcctatctgacatgcggtaggtgctcgggaagtttttggtgactgactgataaagggcccagtagcacatgctgacatgtggtagacagcagatgtcagtttccctcctcctcctgcctagtttggcatcttttctcctgtcctctttgatctgtcacttaactaatctgggaaggccttgccttagcaacccagggagcctagctggtctccagcatttcacccccttcttgagtatctagctgatctcttggcctagccttggccagcccccagcattcaaactttgtcccttctggtatccctgtggtttcactctcccaccttcccatcagctacttcccactgatagtctccaggcactgccccttagtcagtcccgtgacactgggaatttgtcatgtcactcaggatagaattctgtgtcaaccagggaaccttcagttcaaagtgacggcaaattgctaaacaaagagggagcttattggttctaatcactgccagtcaggcccactgctggagttgggtgggctcagycccaccccaccacatgactaccacatcttggggggcaggtggcagcggggatttgggggaggtaaccaatgtcctctgtagagtccttcctggagtgtctgtaggtcctagccacaattctagtttatgcatttgggacaccacctttgctaagcctagacagtattggatgctgggagagggtagggagtggtacagtggtacatgaggactcagaatactgtcagtggtgcatgctgagatggaggtgggccgggtgctggaggagcattgaggagacagcaactgcccaagatacgtggtcccaggcgtttcacaaaggagaacaggcctgagctgggagcttgccaagtacagaagggaggaaggggcattccaggcagagggaacagtctgagcaaaggcctgggagtgagactggggcagagtagacagaaaggagggcgatggggaaggaagacgtgccagttcccttccttctgattctgtctcgtttgtatgttgctcaaatcaaaaagttgcttgacagcttaaaacaatatcccacagtaaaagctaggtgggtgccatggttaggacctttcttggagtctgctggggctcctagtgccacaaggggagctctggaagatccttcagtggattatgtccccttccscaggggaccatgacctatgtcccctttgtcactccatccccagtgccagcctgggctagatcctgagttcctgaagttccgctgtawttgcaggtgyaaagagaagaaatatgattatgataatttgcccaggacatctgttatcatagcattttataatgaagcctggtcaactctccttcggacagtttacagtgtccttgagacatccccggatatcctgctagaagaagtgatccttgtagatgactacagtgatagaggtgagtcccggccagggctctgggaagagcctgtscttctgtagcagtgtctgggaggtgagagtgggatgcaggagggctaaagtaggcccagtaaggatgggcttcctgtatcctcctgtayccaaggaagacctcagggatagtagcccagaaacagtaggcgtgggaaactggaaggagcagggcattctcttggcagtttctgggactgttcatttcattggccagtggaggtgatgtaggaggtgaggttgcaggatgggcagggccagatctggaagrgccttggaggccaccataaggggttgaggcttaagtgcaagcttgatggggagctttgcagacagcaaggtccaggtccctctgaggagctcactgagccagctgtgcggggaatggccaatggcaggggaggggctgggtgaggatggaggcaaggagggtggaggggcctctgtggtgcccacatgcagcagagccttggcttggctgggactggcagtgccaacggagtagcatcagcccgtgaatccttggggcctagctgaagtgagagcagctaagcttaaccaaggacaagtgtcaagtctgtaacagcaggtagagctgtgggcttagtcactacagcctgtctcaaagggaagcaacccctgctgatggggcatctgctgcctcagatgctgcacttgctctgacttcaaaactggcctctgtgtgttctaataggtgtgtgcattgggctgttttcacagactcaatagtgactcacacaagatagaaacaggcttctcacatcacaaatctggtgtgctagtctagaatgggtgtggtggctccttggtggatggggcctcagctccttctgcacctgttcccaccttctctagggtgctctgctgccttggtcctcatggaccaggctggtttttcacctcctactcactctggtcaaccagaagacttaaaggggaaggagagccacacccttcctcccgagggcactgcttggaagttctccacacatcccattgagcagagcgtggttgcctggccacgtgtagctgcaagggaggctgggagctgtggcctttatcctgctggctgtgtgttcagttacaggtcacagggagaatgggtttaaggcacaaggagcagtgtctgtgacagcgtgtaagccaggctggggtaagccaggctggggtttggtgctgactatagcctagaaggcattgggttctggggtcagggcacctgggtctgagacgatgatccagttatggcaccttgggcgagttgcttgtcttttctgagcctcagtttctcacctgtgaatgggtctgtccacacctatctcaagagaattatagtggggaataaatgggatcatgtataggacagaacctcatgtagcagccggcacatagtaggtgctcatctgcatttcctttttccgtttccccccagggtcgttttaaatctctccgtgtggacattggttctgggccacactgcacgggcttgaatccccctcccccaacacctagcgactagacaactttgagcaatgaccctaaccagtttcaaacttggcttcagcctctataaaatgggaataatgatagcttctaccttgtaggatcatcgtgagcattgaatgagatgaggagggtaatgtgctgggtaggtgcttggcatttagtgagctcttgttagatgataacttctatttttataatgtttaaatgtttaaaaagttgcaaaatgaaaaaaacagcatttcacaaatatattaatctaaagtcaaagagcggattatttattttataataatgggattaaatagctcctcagtaggcaggaatacagtagaaattcctctgacacatctcagttctctcataaaaatgtgaggcagtgtggaccaagcttcccttcctgtcattgtgggaacttgggaaaacaggcatgatgccctgctttaacctgtaatgagttaggaagtcctgccttgcctcccctccccaccatttctgcagtgtcagtgtaagcttgatgaaagggtgtcaggccctctcagatgcagggagacagttcaggcagacataaaattaatgctgacaagatccatcacgagtgcagggcagccatgctgcactcatgggttcactgggtacagtagctaattagctttgcttgcaaaattacctgccttattcctgccatcaacttatttgtggttataatttggatttttttaaaaaattggctgggtgcggtggctcatgcctgtaattccagcactttgggaggccaaggtgggaggattgcttgagcccgggaatttgagaccagcctgggaagcataggaagaccctatgtctacaaaaaattttaaaagtagctaggtgtggtggtgcatgcctgtagtcccagctacttgggaggctgaggtgggaagattgcttgagcccaagaagttgaggctgcagtgagccatgatcatgccactgcactctagcctggctgacagagtgagaccctgtctcaaaaaaaaaaaaatcaaccaattaatgcttttatttattgatttatttatagacaggctctcactccggtggctgctctgggcggtagtgttagcttgtagaatttggagccgggttcccctcatggctcttcaacttccttactctgtgaccttgggcaagttacttagcctctccggcctcagtgccctcatctgtgaaatagggataatactatcacctgcctcagaggattgttatgaggatcagataggttatctagaaatcacctaggtagtacttggcacagcaagtcctctttagttttagctgctattattattgttactactactgaaactgtaaagtactcctgagaaaatttctattaacataactactgtttttataaaaattgcgattagatggttcacgtgttttttggtttttaaatgctcatgagtcaaaactgtaaagcattttttgtaacagctktattgaaatatattcacacaccattcaattcacccatttgaagtgtacaattcaacgtgcatgtgtttagatggggagcaaatggtggttctggaattcctcccccagcctcctcctggccttcggagcacttccaaccttggttctgggtgaggtaaggatgtcccaggtggcagagcaaaggaggctcctgtctatttcatcttctgtttgggacagggaggcccagaaggccccgggttgggatgaggcgctcctccgagattgtcacggtgacccctgttgctttgtttgcctccctagagcacctgaaggagcgcttggccaatgagctttcgggactgcccaaggtgcgcctgatccgcgccaacaagagagagggcctggtgcgagcccggctgctgggggcgtctgcggcgaggggcgatgttctgaccttcctggactgtcactgtgagtgccacgaagggtggctggagccgctgctgcagaggtacgtgagccgcccaccatgggagagacagcatgttacctggagtaggtagcatgaggaacagactcatcacgtcacttgagggttaacgggttgcctgggctcagctgcttctctgtcactgggcaggagagcagtccctgcttagttcggctgttgagaccgttaaatgatttagtgcatggcaagtgcctgggagtgccagctggagaaggccctgtgtcactgtttgcttttattattccttcttttttctttttattttttgagacagagtttcactcttgttgcccaggctggagtgtaatggtgtgatctcggctcaccgcaccctctgcctcccgggatcaagcgattctcctcctcactcctcctcagcctccggagtagctgggattacaggcatgcaccaccacacctggctaattttatatttttttgtagagatggggtttcactgctttggtcaggctggtctcaaactcctgacctcaaactcctgacgtcaggcgtgagccaccacaccggccttattattcctttttatccgggcttgttgcagaaaaccgaggaagtatcatcaaccaagaacattttaaaaaatcctcagtcaaatagaatggcactcctaaagaatacacattttgatgtatttctttcaagcagggctgacttaacccttacacccaggaggaacaatgcctagggcccatgaaactggaaggaacccagataaatgttatgaatttcttttaaaatcagaagggaaaaatgaatatcataataatgggtatgtaataatgaatctagcatggattgtatttgtctttataccagtatagtcataaaatatgctttttaatatgtctggttgttatagaggaagggtccctgaaagtcataatgtaaccctgttctcaaggccattgtccttgctgttccacggcatctcactctcaccctcctaccttcccccctcaagaagccaccatctactggggcccactttttgttcccttctgtctctttcctccccatgctctgcctcgtctctctgccctttctgtttctgcatcatagaagtcaggagctggrcttgccaaccagaagctccccaggtgggagaggaaggaagggatctttgcttggcctccccgctgtggagcaggcaaagggctggaggggcagggtctctgcagctggggaactgcttccccgcagatgccaactccatggttgttagggttgtctgaaagagctggggacccacttgccttccttcctgggtgtgacccagctgccccctgccctgccacttcctactgtcctggcttcttgtcagctgcaggttctatagctgtctctttctcctcctcagctctgatgagctttcctagcagcagattcgaggctcctctggcctgtgatggagctggagattagagcacagttatggccgagtgctccctctggaacccagaccaatgggctccccttccttcgttcccccactgcactcatagatggccacctctacacaggtctgaaatcatggggagaggacatttctttctctgcagctgatggattaatgcttttagaattcctcttcatcccaccctttggacatgggccagccgcctccttgctgcatgcctgtrgaagaggggattttccacctcggttgtctgttagaaatacctgggaaactttaaaaaatttatattttaatttttaattgttgtgggtaaatagtaggtgtatatatttatggggtacatgagatattttgatacaggcatgcaatgcataataatcacatcagaggaaatgggatatccatcccttcaagcatttatctttgtgttactaataatccactcatactctttttttcttttttttttagacagagtctcactctgtcacccaggctggagggcagtggcgtgatcttggctcactgcaacctccgcctcccaagttcaagtgattctcctgcctcagcttcctgagtagctgggactacaggtgcgtgccaccgcacctggctagtttttgtatttttagtagggacagagtttcacgatgttggccaggctggtctcgaactcctaacctcagtgatccacccacctcagcctcccaaagtgctgggattacaggcgtgagccactgcacctggcccagtcatactcttagtaatttttttthtctatctatctatctatctatctatctatctatctatctatctatctatctgagacagagtctcgctctgttgcccaggctagagtacagtagggtgatctcggctcactgcagcctctgcctcccaggttcaagtgattctcctggctcagcctcctgagtagctgggattacaggcatgcactaccatgccaggctaatttttgcatttttagtagagatggggtttcaccatgttggccaggctggtgtaaaactcctgacctcaagtgatttgcccgtctcagccttccaaagtgctgggattacaggcatgaaccaccacgcccagccagttatttttaaatgtacaattaaattattttttttttttactatagtcactctgttgtgctagcaactggtacgtcttattcattctttctatttttttgtacccattaaccatccccactcccccaaccaactacccttcccagtctctggtaaccatccttctgctctctgtctccatgagttcaattgttttaagttttagctcccacaaataagtgaaaacatgcaaactttgtctttttgtgccttgcttatttcacctaacgtaatgacctccagttccatccatgttgttgcaaatgacagcatctcattcttttttacggatgaatagtactctattgtgagtatatgtaccacatatcctttatccattcatctgttgatggacacttcggttgcttcccaatcttggttattgtgaatagtgctgcaacaaacatgagagtgcagatatattttcgatacactgacttcctttcttttggatatgtacgtaggagtagaattgcaggatcatatggtagctctatttttagttttttgaggaaccttcaaactgttctccatagaggttgtactaatttacattcccaccaacggtgtgtgagggttcaacctggggagctttttaaacacaccaatgcctggtcccatttggatctaactcttggggctggggcctcggcttctgcatgtttcaaaagctccccaggggactttggtgtgcacgagcattgggacacatcagactgtggactctccctaaggtggccccagacaggagtggtaaccctttccatccaggggcttttggaaatgtgggagggtattcttggttgtcatgtcaaccaggtagggctcctggcattttgtgtatcagggaggccaagtatcctgcagatcagccctgttcagtggagaatggttctggcccagatgccaatagcatccctgtgggtcctgcacattctccagccacgactgggagtcctatactccaatgctggtacagcattcccctagttttcccctccttgtaaaaattaggctttctgtggttccagccagcttgatcacaagccatcagttcctgggggagctggcctttgccaggggccagctagaacttgcccagcaggtctgatgttggccctttcaaccttttaaataatgccctcaattgctttaaataagcggatgttggtggatacctagtatgcaacttcctcaatttggggaactcacagatctaagaccctgtctcacgcaacctgttctgaacagtgcaatttcccgatagttgtaattcttaccccagagtggtatttctaatatcccctctgactttctggtgtcattctaaggacaccgaaagctcaagtctggttgatctctgttgcactgtcctgtgtggcaggactcttaggatttttaggtctcaaattccagacaacgtcccccaaaatgtactcaaggaaatctagtgttcacacgtggtctagtctcagtccatctttcctggtgtagtggcaaatgcaaagaaacacggcctggaagcatgctgagggatggccagatttgtaataatgtggagagaaccgttgaagccaacacacaggctgatacctgcaaaaggaaattatagcatttttcactatatgtaatatttcacaataacaaacattaaaataaaaaaatagcaatagtttcaggttctctgccagctatcttaaaaacattttcccaggaagtcctcacattaaccctctgaatggatattataattccagtgttaccactgaggcaataggctctgaagttaggtgacttggctaatgtcacacaacaaataaatagcaggattagaatttatattctaattccaaagctgaccctttggtctgggtgcacctttgttcttaggagataagtatttcttgatgttaaggtgtttcattgtgattaaacctcttgcacttctgagaaattgaaatcatagagcgtttggtcagaatgtccatggatagaatcagagcatattaaagtcaygggactttttgttttaaagccctccgtggcccccagatctcccccatggtggtcacckgccagggctctgacacggctgcagacacctggaataagagaagcaggtctttctcagatgttcctccctcttattggaaggaagacaagaattcacccttgaatttcccaattgtcttcctgctgcccgtctgcataggagagacggatggatgtcttgggtgctttcaggatccatgaagaggagtcggcagtggtgtgcccggtgattgatgtgatcgactggaacaccttcgaatacctggggaactccggggagccccagatcggcggtttcgactggaggctggtgttcacgtggcacacagttcctgagagggagaggatacggatgcartcccccgtcgatgtcatcaggtcaggagctgacttctgggtgacttgttttttaagcatgcctcattgaatctggctgacctgtgagcggaggccctcgggaggaatggttagctgtcagcttaactacctcccctcttcccacttttttgcccagagtatttgtttatttttattaaacgtgtctgctacacatgtcaattttatatcggtatattttatttatttaatttttaaattgtggtaaaatatacatcatagagaatttaccattttaaccattttgaagtatgcaattttaggctgagcatggtggctcatgcctataatyccagtactttgggaagccaaggtgggaggattgcttgagtccaggagtttgagaccagcctgggcaacatagcaagaacctatctctacaaaaaaataaaaattagctgagcatgstagtgtgtatctgtaggcctagctagctggaaggctgagataggaggatcgcttgagtcaaggagttcaaggctttagtgagctatgatcacgcaattgtactgcagccgggcgatagagtgacaccctgtctctataaaaaaataaataaataaaacaaagcatgcaattttagtggcatcgagcacattcacggtattgtgcaaacatgatctttacctatttccaggaatttttcatcatcccacacagaaaatatccccactaagcaataacttcccattctccccttcccagcccctgggaacctctgttctttcaggcgccccatgtgagtggaatcatacaatatttgtccttttgtacttggcttctttgacttatcatcatgttttcaagtttcctagagaacatcattccttgtgatggctgagtaatattcctttgtacatatatgctacattttgtttatccattcttctgttggtggacacttgggttgtcctttggttattgttaaataatgctgctatgaacatcggtgtacttttatctgcttgagtccctgttttccattcttttgggtatacacctaggagtgggattgctggtcatatgctcattcttgaggaaacatctttaggcccctttgacctggggtgtgggtggatccatggcaggtggaggagtctgctctggccagtgggtgagtcaagctctgagtagaatgggcccaagggaggctcagcagctctcattctggaggttttgaagtgakagcctggcttcttcctccccttccaagttcagaagcaagtgggagacagatgtgggagttgggcaggaggaggtcaggacttcagcctcaccgctggtgtgttgaaccggaagtaggctctgagttttgcgtccacatttggcagttgggcttctgaattctttcaccagagtcctgaccttaagatgacccgctgctggcaggagtggagcaagcaaggagagtgtccagagataaggctggagagatgggcggggccaagggaaggggtttggacttgaccctgagcaggtagaagccactgaagggatcggagcaggaagtgacctgagcatgtgstgcgtgccatgtggtgagggccctggggggaccgttgtaggcagggataccattaggaggctctgcagtcttccaggtcagaaacaatggttcaggagatggtgggcactgtggattccagagatgttaagatggaagaattggaagaaattgagtgggaattggggaaggaaggaattaagaatggcacccaggcttctgtaggagcccttagtgagaacatcctgctcaatccctcactgaataggtttggaaactgagacacagagcaggaggctctaatctaggctacttaggcagcctgtcatgaattcatgggggtccatgaattctaattgccccgttaccccacatgctcagggcacctatcctccccatcccataatatccctgtgcctcagttatctcatctgtataataggtaccagcatatccaccctgcttatttcctagatttttaggataaacacacgtgaaggtgctttgtagtctagaaccttcccttccactggggatgttgctgttgtcttctcagttggccccatgcttggagtccagggcaggccccgatgctgcaggatgttaacattttcagtggttgcgctctcaatgttctctttccctattttttttttcaagttggggtctcgctttgtcacccaggctggagtgcagtggcatgatctcagctctctgcaacctctgcctcctggattcaagtgattctcctgcctcagcctcctgagtagctgggattatagctgtgggccaccacacccagctaatttttgcatttttttagtagagacaggttttygccatattaaccaggctggtcttgaactcctgacctcaggagatctgcccgcctcagcctcccaaagtgctgggattacaggtatgagccaccgtgcccagccctttccctatttctgaattcatccttttgcctgtgcaactctgggacgtgctgaccttacagtgttctgccgtgtaggctggaagccgtgggccgtttctggttagtgctggcttccagataaacctggtggtgggtggcgggaaacaaggctggctgmaaaagcagcctgaggctggctagctgggtcctagtggaggaaaccactcaagaggacctggccctcggggcactttcagatgccagagttgcctttagggccttctgcatactggcctctgagtggcatctgtgagtgcctgccttgtgagatcacacctcctcagatgaccatggcctggagcctgccttcttctcggaacgtggtctcttgcttctctcttctccttgctctctatgcttctaaatgtccctggatttctcccacccttaagcctttgctcatgctggagaaccattccatttcccttcttcttcttggctaactgtcctttgtcctgcagaccttgcttcctccagggaacctagtcctgcccttttgcccctgccctcctcagtgttctcccagggccctggctgaccttagttaacatatttagcacacacatagtacttacctgctgagaagcctgggagccacctcaaggcagggaccgtagggtacatctatgcctccaggcccagcctagtgtggggcacagaggtgaaggcgggatatgcttagagatgacagatgaacagatgaaagggctcgtggtgggaaggtagttggataactgtgatggttttctgctgtctacagtgaaataaggatatcatacttttttaggtctccaacaatggctggtgggctgtttgctgtgagtaagaaatattttgaatatctggggtcttatgatacaggaatggaagtttggggaggagaaaacctcgaattttcctttagggtaagtatttcagtcttctctttggacatgttcttaactgattctctctttgggaacgatgggatttgctgtaagagcctggtggaccctgaaagatgatgacacgcatatcctataaacatgcttgctttcttgttttagctttttaaaaagtgtactttttctagatttggggccagcaagggccttgcgagtcacatagttctctctcactctatggagaggaggaaatgaaaccaggagagaggtgacttgctcagggttaggttcctcctgatcctgtcttctggagcctttacttgattaattccttatgaagtggcctctttatttagcacagtgcctttcaaactttgacagatgtaagaatttcttttttttttttttgagacggagtctcgctctgtcgcccaggctggagcrcagtggcacgatstcagctcactgcaacctccgcctcctgtgttgaagtgattcttctgcctcagcctcccgagtagctgggattatgggcatgtgccatcatgccyggctaatttttgtatttttagtatagacgaggtttcaccatgtcatccaggctgatctcaaactcctgacctcaggtgatccacccgccttggcctcccaaagtgctgggattataggtgtgagccactgcacccagccaacacatgtaagaattgctgggtaaacttgttagaaagacagattcacaagcacaatctagaattctagctagatttgatagctttagggtgggaccaagattctgctttttgtaacaagcctwcctactgatgctactctacatggcccgtgaaaaccgtattggaaaactcctagcatttcagtagattttccagttaatgaagtcttacattttaagcatcaaaactttgtgtaaatgttggtgcttttcagtggaaaattaagatttttaataatattttatwtggtrttctgccctcataaaaactgaataaacaagaatttggccttctaccgaggactcacgccctctgtaataagtamcagatgctgtgcttggttgtcccatctttgggaaaatgagatattcaaggctgtcagtcccagtgtgagatgggctcagatgccttcgcctgttgagtctttgggtgtgcttttaatggtctctctgcctcttccttaggtgtcaggctgctctacctgtttctagacgctcttcctttcccccttccaaacctcttttcttccttgctgctttcctatcttctgtggctaggagatcaggtaatcaagcctgtgttttctgtaatgagtaagtgggttgccagcgaggtctctgtggatgctcctgtgagtcaagtgcatgagctttagtgcatggactttggggtcttggttcccacagcttatatgttttgggggctgctttcttgctctttacccacattctgtgtcatgagtgtgccgggtaggtggcctcctgcccgatggaggctgagcatcttggcagtgtccatcatgccttgcgtgtgcctggcctctttgctgcagatactatggacccgcagctcatcccctgctcaccacctggcctctccttttctctgtgtgcagatctggcagtgtggtggggttctggaaacacacccatgttcccatgttggccatgttttccccaagcaagctccctactcccgcaacaaggctctggccaacagtgttcgtgcagctgaagtatggatggatgaatttaaagagctctactaccatcgcaacccccgtgcccgcttggtgagttcctcggcccacctgcactccatctggcttcatctgaacaacagcagctaatcgtggcttccccaacatagtcgatctggttccagaaatagagaataaattgggtgctcagataygagtawggggagaatttattcctccatttataataattatatgcagtcaaatcttsttatttacagctgttatagtgcataaagccaccacaaatgctgaattcatgaaaacagagccattgttcttaggggaaatacagggttaggttcctgccagacttggggcacagttttgtcagcagatcaatacagaaccttgttttctrtgtgtttctgttcaaagacacctgtttaacatatatcgttgcatcattaacattgcactcatggctaacagcacggtaactcatgccagaatgaagcttacctagcacgtgttattttctcttcatcacaaccttcttgcatttaggaacactaggtagcacttcagcrctaygaytgggggacattctagaatagctggtgcagtcaccaatacaaagcaggaaaaaatgtggtgcccaacagatggtgaaaagaacactggtttacaggatgagagctgaaacaagaaggcggtgtgtgcccttgttmtrtatcacctggaaatgggagttaagtgttgggcaactcaaattttttgtccatgaatgtgtgtgaaaattagaaaacaccacaagtattgatttggaggttacaaatcaattttattatagcatgtagggaaattcagatacagaaccagtaaataatgaggatggactgtaccaacatagayagttggggatacctggtgtcacaggccaggcattgtccatgtgttttggttttcctctttgtagccagtagggtgagtccacaaacacagggtacaagttaaggcacagttctttaccttaaagctattgctcagggacacatccgccttattagttaggggtctgttacctccctctagagccttcttgttagcaccctggaagcttccttttctaaaacagggagtctgttctgcttccatttycagatggaaggactactggagagtggcccaggcccccgctgctactctttctcaccatatgtcatggtcatggaaacccccccaccgccagcctaacagatgtctatcttcctccccactcagaggccttgctgggcccatctctctgaccaatggtgaaggtgtgcctgcagtcactgaagtctcagctcagttggcttgctcccctgggtctcagccacacactacagggacactggcccatccacccactgcactgagtctgtcggaggctgaggttcagcccagactgtgtccttcctcatagcgatttatctcagggacttgttttctggtccggatccttgctctgcctctacctccgggaccattgtggatgagggatctgcctcttctttcccaggtcttgggcttcagatgaaacacagtccactgcctctgccccagccagctctgcatgctccatggcagggtgcctgcttgccctgcatttgcataactagtagggctgcttggcaatacaagaaggtcttgctctaaggcttctcatcaggccacttcatggaagtctcttctgagtccttccagcaaccctgcagggtagcaataaaattctcattttatagatgagaaaactgaagctcagagagacgctgttggaaggaacttgtccaggccctgtggctgataggaggtagaactgggcttggggcctgtactctgcagcgcacctcttgctctgctctscagagcccatgggttctcagctggactcccactcagcccctctctggctctgggctccatggtcatttgcttctgcctcctccgtcttgcccagcaccatagagtagaaacacccactctttcctcatgcacagtctggaacccatagttcccttttcctgagggttcccagagaatattttaggggggcactgaatgcacccttaggcttcatgtccaaggccaagtgctaaatggatacttggctgaagctgggggcgcagtgactttcaccagtgaaagaactctgggaaatagcagaaatctgaaatcttattcaaacatgtacttattattaccattttgttcaatatttaacttgtcagcttttaattgtttaacatgacagtgcaggtacggyaatatttctgcactcagcatttttcttgtggctgcacatttgcgatactaaatagaggcttgctgtatttaattattcaaaagctctcagtcattagttttgcccataaaaccaaacttgcataagtatttctttttgcttatttcatactgagaacatgattacatctagaatatttacctgtgtttgaaagtggatattcagatattagtagtaaaccagaaagtcatggcatatgtttcggtgaaactgacatttccctggttgggtttcaggatgacttctgatcacaagcatgggtcacaggtccgggatccatagatgccagtgcagccccagggcttggctccttcactccatcagcaggcgggttgtcctctacccttgtgcacctggtcacacccccctgccaacagagcacctaggaatggaattgtctgtgtgacagcctctcatactagaagctagaattaggtgcaaggatgttttctatcctctgtgctccacacagggcctggcatgcgasgaatgctccatcaaagctggctggtggttagtaagtgagcatcagtgaacacaggggctttgaaaggaagcactaggacccatggggtctcactgttttgttgttttctcaggaaccttttggggatgtgacagagaggaagcagctccgggacaagctccagtgtaaagacttcaagtggttcttggagactgtgtatcyagaactgcatgtgcctgaggacaggcctggcttcttcgggatggtgagtgagggtggtgggcccacggcaggcagggacttccctggcctctgggtctgctctkcaaatcctgggcaagaaaggccacgtcatggggagcactggcttcctccactcccacccgcctgcccaccccccaccacctttttatccactgcccttctttctccctgtgagcgtctgggccgtaggtgcagaatgtcagagctggaagccatctcaaaattgacaactattttgtaggtaaggaaactgaggcttatctggtgtttccatgtcctagtttttaccaacgccttatcatattacttctagtctcaatggctggactagttaataattccaagtttggaagtctacagaggcaatagtgggtataggggagtcacttcgagtatttcaaaaaacctaaaaaatgtttttgggatgagaccagataaaatgtccagtgtcttttgtttttgctgggaatgacaccagcttagcaaggtctcctctgctgtgatgtgttgatcagaagtgctggtgttccattctagaagtctttgatacatataaagcaggatattcatgttacattctattttcattatgaaaatattcaaacatatagaaatgcagagagaatggtatgagaatggtataatgaataccatccctgagattctagaattttcaagatcctgcctctctttatctctttctctctcctgtacttcacctccacattttcctctttttaagcaaatcccgggcattgtgtcatttctctcctctgcattttatgcattttcataacatttggacattatcttacaaaaccgtagaaatgaacaagtatttcttggtatcatttaatgtctagttctaatacatattcccccaacttttccagtttctctttgagtggctggctaattcgaattgggatccaaacaaggtgcacacattgcatgtgatggttgtgtcttgtctcctaaatctcttttaatctaaggcagccctcttcctttttcttgttaatatctttaacttgttgaaaaaacaatatgttacctgtggagtgtctcactcttgcaattgctatttttttctttgtggtgtcttcaagttgtgcctctctcccccatatttctttaagatagaagtgagttctaaaggtttgattagagtcaggatccacctttttggcaagaacactttgtgggtgatgttatgtgttcatgttgtgtcatatcaggagcataggaagtatggtcatctttagtgataaggttgaccagtgggttaatggagtatccctcacctggaccagtcattataagacccccatcagcctctgtctcatgtttttagtagccactgataaccattgcctaggcccattatttcaaatggagttgccaaatggtgatttttctctttcatttcttccacatttattagctgaaatttttcataaagaagaacactccctcattaactaaagcaatttggtatatgtgagttttagaattcatacagaaaaggcacgacaaattcttttttttttttttgagagaaaagtcttgctcttgtcccccaggctggagtgcaatggcgcgctctcagctcactgcaacctctgcctcatgggttcaagcaattctcctgcctcagcctcccgagtagctgggattataggcacctgccaccatgcctggctaattttttttttttgtatttttagcagagacggggtttcactatgttggccaggctggtcttgaactactgacctcaggtgatctgcctgcctcagcctcccaaactattgggattacaggcatgagccaccatgcccggccaaggcataacaaattcttaagtcttttctttatttgcttattttcagagtaagagttggtattttagtttcctccagttgtatctactgggttgtttttttttttgttgtggctcattgttttttttggctttttctcttcttgagtgtcattgtaaactaatgggtgtttaaatagccggtgtgcttcaatcaattcatcttttcttctttgtattgttttttgagacaggcttctrttctgtcacccaggctggagcacagtggcaccaytgtagctcactgtagcctggatcactgggctcaagtgatcctcccacctcagcttcttaagtagctgggactacaggtgagcaccaccacacctggctaattttttatttttayttttagtaaagactaaggtctcgctatgttgcccaggctggtcttgaactcctgagctcaagcatttctcctgccaaggcctcccaaagtgctgggattacaggtatgagccactgtgcccagcccaattcatctttttaaaaaatatatgaaaattgtttttggccagtgggagtccctttattttggcttctgaggtctttgacaccttacagtggcgttgatagcctccttgattctggccaagttgtcccattcgagttttaaacatttcctgccattcctcccagaagccctgctcctttgttgggtaacggtattgggagtcagtctggatgctggcggtgcccgttgctatgcgttgtcattgcctccagaccatgcagtttaacagaaatataatgagagccaccgttgtaacttaaatttttttagtaaccatattaaaaaaaaagtaaagttaatgaaatgtttaactcagtatatcccaaataatatcatttcaacatataattaatataagtatttattcattgaggcattttacattcttttttcatactaagccttgaaatctggtgtgaattttatacttatagcatatctcaatttggattagttacatttcaagtgtccagtagccacagtggccagtggccgccacatgaaatagcacagctctaaatttttctcattgggcagagaaaggaaattcgtatttttgagaaacagatcatgagcttatattaatatctgaaaatccaatgtagtcttgaaaaattttctttgatagcatactcatatttcttttttcttaccctgaaaatcttggttttaaacaatattaacataattacttattttctttatcctaaaatatattgaaaatagtttcaagataattaatacagtactacagcttagagtattatactgaatgaggtttataatttctttgcagctcagtttgtttatagaatatatttcataggtggtattttcaaacataccatgctctaaagtgatttaaattaattctttttttttttttggtggtggggaggacagagtcttgccttattgcccaggctggagtgcagtggcatgatctcagctcactgcaacctccgtcttctgggttcaagtgattctcccgcctcagtctcccaagtagctggtactacaggtgcaccccaccacacctggctaagttttgtatttttagtagagatgcggttttgccgtgttggccaggctggtctagaactcctggcctcaagtgatccacctgcctccgtctcccaaagtgctgggatcacaggcatgagccactgaacccagcctaaaataattctttctttgtgtctatcgcctgcttgatttagttagcttaattaatctagttcgaggtatcaacccaggtatatttggacttgcacagcagtaaggctgctactaatgagaaagaaagagagaggagctttcaggccatgaagagtttatctctctggtcctcaggcttatcaacttaaaataggggtaaggattcttgcctgcagaacaaggaagcacttttaaagctagaaggtgctgtacagaaaagactcttacctttgcgtctagctcttgaagcaggctctcctctcatgccaggtaccctccccaagccttgtgtggcatctgttagtgtctataaatctggactraaatgccacatttatgttttatttagctccagaacaaaggactaacagactactgctttgactataaccctccsgatgaaaaccagattgtgggacaccaggtcattctgtacctctgtcatgggatgggccagaatcaggtaggtatgagcctcaaaagaggagaaagctgtgtgttttgttaaaaaaattaaatakttgaatttttttcttgtaaaagtaatatttgggaaatataaaaagtagaagcctagggtggccagactcagagagaccactgttaaaattaaaatgtgttttcttcccatcattttttacacataacacacagagattatgtgttgtaaatagttgtcataatgtctgtatgttttatattccattatttccattcccttcatctacttttcttatgttattagataccccttgagaatatcattcctagtggccacttgatatttcattttgtacctgtattactgtttcgttaactggttccctgcctccctgtctttgcaattataaataaccctgcctctaacaccttgggtcagacagaaggaaggataaagtaacagatctgcatttcagatgatttycttagaattaattgttaagtggaatgacaggtttaatgcatagggccaccttgcaaggtggtgtttagggacattgcctcagctgggggccaggtgtatctgtctgggtgaagggctgtaattcaggctgggcaggggagattcagtcctgggggagtctgaagaccagaaaaggayccccagccctggaaagcagttgacaggacccttggaggatgcaggaatggagagaagtgttggttctgggcctctgaagcttcaccgtaccaaggagttatcagacaccaggaaacraagggatagagattcagatgttgttttttccaatctggattcaccccaatgccacttgaatatgaggccttcttatggtcaagagtaaactttcttaattccaacccctgcaaccttaaattatttaggttttcaacactgtttagaacagccttcctcaaagctgatggtacctgagtgctaccatcagcatcatctgggagcttggaaatgcacattttcagactgatcccaacactaccgaatcccagactcttgttttaagcagcttttcaggagataatggtgtgacaagccctgctctgtgcgccttaagaacacccacctgtgtcagaatttttgaaaggggctggtggggtgggtgggtgtcttgtcaaagatgcagaaaatgcagcttcctaggccccacctcacacataaggaatccttattccgtctctgggatggggccagcaatcagcatttttaacagtcactgtaggtagttcctagtacactcaggtaggaaaaccattgtccgggaagaaccaagtcttcccgttagcggtcacattgtctgcttgtgcacagcactttacatcttctaggaactgtcatattgggggtttgggaggagagactgaggaaaaggagaggaagtagctagtcaaggtcacagagagcccccaagagctagtgctgcgatgggtccatttcccttcctcccatcccacaccaacacagcattcagcactgcaggcaggaggtgacatgcaccagccctgtctccctgtctagmaagctgggcaggcatgggaagggccatttcctccacgctcatgaagcactgcagtagcggttcactgagggctgtgggatgcggaggaacccatcacacaggctcgtgttggtggtgacgcaggtgcawgaccccacccatgctctcgtgatcccaggttcttgtccagcgatctttcctcttcccacatcagtggaaaatgttgtgttacatgttggctgccccatttttagtttttcgagtacacgtcccagaaagaaatacgctataayacccaccagcctgagggctgcattgctgtggaagcaggaatggatacccttatcatgcatctctgcgaagaaactgccccagagaatcagaagttcatcttgcaggaggtaggtgaactctctccttccttcctgctgacagtccctgggctataagggagagtgtgagagtcagacgttctctctggcatagtcctggtgaggatcagggatgtggccatgcatggacaggagctctggaagacctggaacctcagtcccagtgagcctggggggcggtgatggcaggagattggagtcccctggcacacggtgtcattagcactgccttccttcctcattgtccagtcccttttagtcttttccatttcccttgcacccccatgagctgcaggcaccgacatggaaacagctcttacaaatgcattcagagatgaaagggctttaaatgagtaagccaaatagcccaagtgtaaggatgttagccaaagtgttagatccagatataagccaccccacctctctaagccttgtttttcccagctttaaaataggtacaataggccaggcacagtggctgacgcctgtaatcccagcactttgggaggccaaggcaggtggatcatccgaagccaggagttcgagaccagcctggccaatatggcaaaaccccatctctacttaaaaaaaaaaatagccaggtgtggtggcatgcccctgtagtcccatctacttgggaggctgaagcaggagaatcacttgaaccggaaggcggaggttgcagtcagccgaaatcatgccactgcactgtagcctgggagacagagcgagactccgtctcaaaaaaaaaaaaaaaaaaaggtgcaataatagcagacttactttactgaggattagatgcatagccagaaatattctttggaaactataaagctcgatagagattagttgttgcttgtggtattataaccaagaaaacacctctgatagagtagtctccccggatagtcacagttgatttgaaactgagggttacctcagacctgagggtgctggccccaccacacttgcagtcagcttgcatcaggacttgtaaatcgatcatatcctttgactcactaaaaagcatgtgagggaataaatccaaagaaaatcatttgaaagaaaaaaattcattgttttttatctccctgggcagctttcactcccaatatactgcttataaatgggtttattctaaagatgattaaaagctggaatatgttttcctgcagaaaaatgttgtcactagcaatgacatttgcaggctgcccagaaaagccacacaccatrgtgttacctattgaatacaggaaaataagaaggaaaaatacttctgcacaccccagacgtctctgatcttcttgaaygtcctcctcttcccatctttctcccaaccagaagccattgtaagccctcaaggaatggtagkggacactagaaacaataaaatcagtttgacatatcaaaaattttatcttaaatttcagtgamcatttaaggaaaaggaagtttgttcaggaggctgggaagaaggatactgaattggattttttacctttcttcaggacgcttaatactttgattcatatgtgaaaaggatacagcttgatttattatatttcatcagtcatgccctaaatatatatatataaaacaaatatatattgaacagaaacatatgtgaattctgaaggaaatgtccccacttatattcactagaccataatagaaagcttagttcttagggctggatcytttttttttttttttttttttgagacggagccttgctccaccaaggctggagtgcaggggtgcaatctcagctcactgcaacctctgcctcctgggttcaagcgattctcctgtctcagtctcctgagtagctgggactacaggcgcccgccaccacgcccagctaattttttgtatttttagtagagatggagttttgccatgttggccaggctggtcttgagctctttggcctcaagtgatccacctgcctcagcctctcaaagtgctgcgattacaggcgtgagctactgtgcccagccttgtattttcttatgtaggcctaaaaacctctgaaatgtcatttcttggattctacaaaacatgagtttggatttttttgaatgaaaaaagttccatttagtgaacagcacatcacaaaggtttttcactgatgttgttattcactctgcctgtttgctgctcagccatgattaagttcgttgcatacagcttataacagagaggcagagggaaaagataaacaccaggcctgagagagagacttgctgagataattgagcaagggctggcagaaaggagagaagcaggaggtcattaaagaagaccatcgtctttggggtttgggaattggcacaaggcatataacccactgattctctgatgtgtgacaggtgagtagctcaggccaagtgactggcttcctcatccatctggtctgtggctgagctgggactacagccaagtttccacactctgtttaaatacctaagagaaagagatcaccctgcacggaatgagttgacctaagaggagtgaaagagataaacaaaggatctttgttcctgatttccctgaaggaagccaaatgcaatagggagatgtagggtatgacacatgcccagagcagccagcaggtggcaccatcggtcctgtgagaggcaagcgggacgcagcctgtacaagcctggtgctgtgtccccgggacagtcctgagttgctgcgttacacggaagacacttacccctcaataaatatttctgaaatggtaaaaatcagaccctgatctctttaaaacatgtctttaggaaaaagagacttttctgatgacttgcctgtcattctgttatcttttgtaggatggatctttatttcacgaacagtccaagaaatgtgtccaggctgcgaggaaggagtcgagtgacagtttcgttccactcttacgagactgcaccaactcsgatcatcagaaatggttcttcaaagagcgcatgttatgaagcctcgtgtatcaaggagcccatcgaaggagactgtggagccaggactctgcccaacaaagacttwgctaagcagtgaccagaacccaccaaaaactaggctgcattgctttgaagaggcaatcattttgccatttgtgaaagttgtgttggatttagtaaaaatgtgartaagctttgtacttattttgagaactttttaaatgttccaaaataccctattttcaaagggtaatcgtaagatgttaacccttggtatttagaaaattaaaaccttataatatttttctatcaagatgtatattttacagtcgtgccttttactctcattagcaaaaaagataaagattttattttggtatttacaagaattcccaggtacgaagatatctgcatgggtggaaatcaggttcaagcaacrtactttgcattaactgataatacctcagctgcggggttaaagttttcccagtatagagagactgtcactaggaacattgtattgatttattsaggtcattgagatcttctagatgtattttaaaaagaatgctttttggttatgtgttgctaccacagttaacactccataatgttcatgtcagccaaagaggactaaccaaagctgaaatctcagagaacaatttgctttactaagctgagtcaacttgagagcgaacttctaacaatgccgcactgtagtgtggctggttctaccactatgactttaaaacatgtttatatcatttttaatttttatgatacggtagtgtcagggagaaatgtaatgttctatatgaaattcctttttcaagtttgttcattaataacagttattaatttaaatcagcgttagagtttgtgctgctgcaactgctgtgaaaatttctctgagtaattctgatttgtgaatgatcccagaccaaccctgagattttgtcaacctgattaagtcaatatgaatgattaaaaagatgtgagaacactgactgcagatctttttgtactgtaaaccaaaaataaaattctagggccgggtgcggtggctcacgcctatactcctagcactttgggagggcaaggagggcagatcacttgaggtcaggagttcgagaccagcctggtcaacatggcgaaaccccgtctctattaaaaatacaaaaattagctggacgtggtggcatgcgcctgtaatcccagctactccggaggctgaggcagaagagtctcctgaacccaggaggcggaggttgcagtgagccaagatcgcgccactctactccagcctgggcgacagagccagactttgcctcaaaaaataaaaaataaaattctggggtcccccatctgattgaatggactcctctcttggccaagaagatcccaaaaaaacctgaacctagttcagaactgaaaaactagttcaggccatgatgagaagggagcagtatccagacaagcctcattaccctctcctccctttggagtttaaagacaactgactggcattcacgttaaaacagatctcttaagatggaccaaacagactctttgtagcaacacataccaaattccaacctgactggtataacatcctatgaccctgaaggaaatccaagtattttgccacaaaatatatttctttaacatattctgaaatggccctgcaaagctgtctcttgcgggggaaatttacattctgtagagaatctccttccctaactaggtcttttcaggagagtctgacactttttaaggtctgataagagaccttcacatctattttctctgaagcctgctacctggagcttcatctacataagaaccttggcttccacccaccatcccccccaccccaccccaccccaccccaccccttacttagttcagctgacttggactcttcaggcagagcttaactctttcaaccaattgccaatcaggaaatcttcgcattcgcgtgtgacctggaagccccgccccccgcccccttctttaagatgtcccgcctttccaggccaaaccaagttatgtctgcctgtaacttctgtttccctaagatgtgtaaaatcaagctgtaaccaaccaccttgggcacatattctcaggacctcctgaggttgtgtcacaggccatgatccttaaccttggcaaaataaacctctgaatggattgagacctgtctcagatagtttttggtttacaggaccaatcagatgggagcgatgaagatacacgtggaattgattaaaaggtatcaatttgtgtctcaggctctttttgacatacattctccactcagatcctgtcaaggaccagtttaacatttacccagaaacaacttggcttgggctggctcgaatccatctgatgcaacttaacttatctgtacttcagtttcttcattggaaaaacagggataattaaaccaagatatgggatagctgtgaggattaaataacacatagcaggtcagggcttaggccctggtgttaccagaaagggatctggatcttggattacgcacaagaaagaattcagggtgagtccaaagagtaaagtgaaagcaagtttattagagaagtaaagaaacaagaatggctattccattcttgggggtccagagtacccccgaggactactggtgggctatttctgtagttatttcttgattatatgctaaacaaggagtggatgattcatgagttttctgagaaaggggcgaggacttcccagaactgagggctccttctcatagaccatatagagtaacttcttagcattgccatggcacttgtaaactgtcatggtgctggggggagtgtctttagcaggtgaatgcattataattaatgtataataagcagtgaggaccaccagaggttgctttcatcccatcttggttttggtgggttttggctggcttctttactgcatcctgtcttatcagcgggttctttgtgacgtgtatcttctgctgaccttctatctcatcctgtgactaagaatgcctaacctcctgggaatgcagcccagcaggtctcagcctcattttacccagcccctgttcaagatggagttactgtggtttgaacacccctgacactggcccacagtatgggcttattaaatatcagcttctattttcagaaatgtactttaatatttattcaaaaataaatattaagtagtttagctttttaaaatctttatgggattaaacagctctttagcaggcaggaatagctttcgacacagctcagttctcataaatgtgaggcagtgtgggccaagcttcccttcctaccgctgtgggaacttgtgaaaacagacgcaatgccccccctcaacccatgagttaggaagtcctaccctgtctcccctccccaccgtttctgtcacatcagtgtgagcttgatgaaggggtgttgggccctcccagatgcagggagacagttcaggcagacataaaattaatgctgacaaaatccatcaagagtgcagggaggctgcagaggttgcatgtctggagagtctgccgagcatggcagctaattagttttgcttgagaagtcgcccctctaactcctgcatccgcttacattcggtcatttttaggctcgaaaacagtcaatataaaatagaaatcatattttggggggtgtcaagggaaatctttacacagactgggagggaatttacaacatctcgagaaaacgttctcttcaccgatgggtgaagagcctgagaaaaagcccatagggatgtgagggaattcacacatctattcactgtacccgagtgggttcccacctgcccccacctgcccccacctgcctccctggcaggtgtgaatccagggctgatgtgtggagttggagtcctgggggccagccccagctgtggcagattggcagattgtttcgccttctaggactctgttgtagtttcctctaatttggtcttgaggtctgtctcaagagcatgggtaaaaactctagccctgccctgccagggctctagggatttggtcatgaatgtttatagtgtgtctttcatgggacacttcatcctggcagacagcctaatgcctgggtgtccaacccatgacagggtgttcctctcacagaaaacttggtttatactggaagatgcctttgtggctcttgtctgacctgctcagtttattcctaccaagacagcccctctccaggagagccctgacgggggaagaaggtaggtttgggtgtgttggtcaggtgagacacagaagaggcaactcagcaaaacacatgaaataaggctaggcatggctcacacctgtaatcccagcactttgggaggctgagccagtggatcacctgacatcaggagttcaagaccagcctgaccaacatggcaaaaccccaactctaataaaaatacaaaaattagctgggtgtggtggtgggctcctgtaatcctagctactggggaggctgaggcaggagaatcacttgaatctgggaagtggaggttgcagtgagcgaagatcgcaccattgcactccaggctgggtgataagcaaaactctgtctcaaagaaacaaacaacaaaacaaaacaaaaaaaacaaaaaaaccccacatgaaataacagaaaagcatgttactcacagatcagagaggccggggaaggaggcctcacggggccaataggagggtgagagctgtccagaatatgcattcaaccagcatatggggagcaagagagagggacctttgggccaaagcctttttattgcccaggctggagtgcaatggtgcaatcttggctcactgcaacctctgcctcccgggttcaagcgattctcctgcctcagcctcccaagtgtctgggattgcaggcaggcaccaccatgcctggctaattttttgtatttagtagagagggtgtttcaccatgctggtcaggctggtctcaaactcctgacctcagacacgccacccgcctcggcctcccaaagtgctgggattacaggcatgagccactgtgcccagccggggccaaagcctttattgggatccagggaaaccaagcagttttcccaatgggagttttaattgatgggtttggaacaagcaggcaggagttcygggaggtcacaggtgactgggaagtggttgctgtgcatatctacacaggtcatgtgaagtgtagggatcggtgggcaagtcaagtaggttgtatctagctgtcccctagggaggtagtcacaagaaggcagttgtataagcagatatctggatcaaccacattgaggaactgggaagaggtggagaactggaaattgtgtctcaagggtgactaagtcctgcttctggtatgaaaaattccaatttatattcaaaacagatgctgaggcaacataaaattataagaattcactacagactcattttcttatctgcataatgaggataaatatgtcctctgttgatttcttagctatatttcttagttacttttttagcggttgccttagggattccagtgtgcttcctgaattcatcacaattttcatcagtttagcatggagttaattccagtaaaatttggcaaatttacaccaatgcagctctacttcctagcccctcctctgtgctattatggacatatatactatatatattatatactcaataagagaagggtataattactgctttcaacagtaaaagaagattatatatatatatatatatatatatatatatatatgcacacacacactcacacacacagagtctgttatatttacagacatatgtaccatttcccatgttctacattacttcctgtgaatctgagtaaccatttggtgccattttctttgagcataagaactttagtagtttatctaggagaggtcagtttgcaacaaattcagtttttgtttatccaggaatatttttattctgccttccattattgaaagagtttagttggatctagaactctagttgacaggttctttatttttcctttcaaccctggaatgtgtgattggactgctgtaggatctccctgttttgaatgggaaggtgtttgttgatattgttacttctgtgtgataattcatgtttctcttgctgccttccaagattttctctttgtctttatatttcagcagtttgattatgatgtgtctaggtgtggtctgcttgtgtttttcgtacttggggtttgttgaactttttggaatgtaatttaatgttttttattaatttgggaaggttttagccattatttctttaattttttttctacccctttctgtgttcttcaaattggacttctgctggttttgtttgtttgttgtttgtttgtttgtttttagagtcaaggtcttactctgtcacccagactagagtacagtggtgcaatcatagctcactgcagacttgaacgcctcctgggctcaagcaattctcctgcctcagcccccaagcagatggaactacaggcacacaccacccccagctaatttttttgtattttttttagggtcttgctatgttgctcaggctggtcttgaaagtctggcctcaagtgatcctcccacctctgcattccaaagtgctgggattactggcatgaaccactgggaccagtctttatctatctttaagttcacttatttcttccgccatctcaaacctgctgttaagcctatctcatcaccttttcatttcagttattgtagttttcaactcaatatccatttggttctttattatagtgtttgtttctctgttgaggttccctatatattgactcattgttggtacattttcctttaattgtttgaatatagtttaattgttgaatatagttttctttaactctttgactatatttgtaatggccaatttgaagcctttgtaactttgcagattaaaacaagtatattatttcatagtgtctgtaggtccaaagtctggccatggc

SEQ ID NO: 95473 - DNA, 17770 bp, Homo sapiens
aagatgtcattcccggccctacaatgcctaatcggttgataaacaggcaaaccaaacccagtccgcctggcacaaatgaggctgttgtgtacagtaaatcgcatcaaggcaaacgctactggtgacagagacagagtgctgccactgctgctctgctgccactggacagaaacacaaggactgttcctaagacttacactttgagcccaggtgaatcttctgtgtagaatcgccacatccccccggtgcctgccgaggttgtgcggcctgcactccttgtcccacagctggcatttttcctgaaagagaggaaaatgttacaaatggccttttctggaaattattagaatagcattataacatatgctaccattattacacagttaaggaatcaaaaaaaaaaaactttctttgctagaatccacctaaattcctgcttttactcctttgatcatgataaccacaatgaactaagtgcctacctgatgccaatgcatacaataaccctgaaaagcagtcacgatttttccattttataaatgaggcaaattggcctcagaaaaggttaagcaaaatatctaagaccctgcagccaacaggtggctgaacctagctctgaccctggagcccatctgcatgcccaaaacatccagctgtgtcatgtggacaaagcatttcactttctcctcacatgcatctttcatgaagccaaataataaattcctgttttaaaatgccctgaatccatacaagctgatcttaaaatggctactttaaaagatgtattttaaaattagtatatttactgcaaacagacaaaaactttaagctttaattatatccagggcccaagatagagtatacactttataaaaaattactttgttatgtgttgtcactagtttgttttttttttttttttttttttttttgagatggagtttcgctctgttgcccaggctggagtacagtagtacaatttctgctcactgcaacctccgcctcctgggttcaagcgattcttctgcctcagcctcctgcttagctgggattacaggcgtgcgccaccatgcccagctaatttttgtatttttagtagagacagggtttcaccatactggccaggctggtcttgaactcctgacctcatgatctgcctgctttggcctcccaaagtgctgggattacaggtgcaagccaccgcacctggccgtgttttcactattttaatatagtgatcacagatcttgcacagagaggtagaatgtaaaaaaaacgcagggaacacccaaccaaaacaccccttgtgtctctcacaaggggatcaaggcttgtaagatacactatgtaatacacgcagccctggcagacagaagcagcctagcagcacttaggactctgctgccaaggaataggcccaaggaatcctttctctcctctttgggagaagccctcagtcaccggggaaccccacccagcaactacccttccctgcagtacttccccaaccccagctgctcatcgtgccccatgttggagtggtacaatatgggggtaaggggcaagtggtgagaagtcacaagcaattttcttcagaccatgtatcaccaactcagaagtcctagtggggaggagaggggaagcctatctcattgctgcctgcaccattcagcatcaaatcccagtataccctccctcaaaatctcattccagtatctgtgggctgatgattctggatttttgaaaaagggaagggcatatacggaaaagaagagaagtgaaaaccctatccctaccatctcttcttgctttcctccccattctggtcctcatgcctcctttacccaaccacggtctttactccacattctgaatgcaggaagcactgtctacagcacggggagcctgccctgctacatgacggagtgggagagtgcagtcctggttctaacaggaagagctgtgttcatgccagaactttgaaagcaatcagtgccaaaccatgatttgggtctattgtactacaaggattatatttcagacacattaattatggactacgtggtagcctgggaacttaaaacttcattgtgtgaccattcctatgggaaaactgattgtaaatggcaaaacataactgtacagggatttacagaaagattcatgcccttagaaaaggtttcacacacacagatatatgtcattccatctgtggggtatgcagctgaaatcttcctccttgttcattgaaaaggattttaagctagaagataaacccagtgtgaacatattatagtcatggactgagccaggacttggacgcatgcacttcctactatttccacaatatcacacctccagttcctgacttcaaagtttcctggaattacaggagccccagaggagtcaggctggcttctcttaagatttcttatttctgctggcgcatggaacatagaagagtatttgaaaaccagagcccctagaaatactaaagtgtactcaaaatacttcccattccctaggggtagctaggtaaaggttaataaaacacattgaatctctcaaatttgtatttgggggctattttaccctttctttctggccactgtgtaactgtctctcccttctatacctcaacacaatggttttcaaaactaaccagttacacacttggttctaacatggtgcttctgttgctcctcaaagccaacctcatcgacctcagaatcttcatacttacccactccttttgcctaggaggcctattcgtccccaaaccattgtgtgatttgctctcttgcttctttcaggtatctactcaggtattacctactgtgaacaccctatctaaaacaactacctacctttgccctatccccaccactctctatcccccacccagctttatttatcttcatagcccttattgcctgaaattacattgtcttattttccttgcgtttgatctcccacactggaatataaggttcatgagtacaaaccttgcctaccttgttcacagacccatcttcggagatgaaacagcatttggcatgtagtagacctcaataccttgatgtctatacattggtggctattccgccatcttaatatccctgattcccattaatcctgctagaacactatgtggcacttcacacctttacagtttataaagcattattgctcctcacagcaagttccttttatattgtatttaggagagcaagaacaccaactctggcctgagcttaaatttaataacatttctcctccaaggtagtatctatcacctcatcaagcatggagaaggcagctctacagacaacataatccaaagcactattatgaatcattaacttccaatgttttctcagacttataaagcaaagatattcttaaacaaccaatacttattacattatactcatgaaatgatacttaatcactaccattctagaaggaaacactgtcaggtctctcaatacatacaaccatggtctttcttgttacactagctctatcacactgaatcctaaaagatgacaccaacacccacgactttaaaaactgcatctgtctgtcttcaaatgtttcagttctccatttcacttgtgcatcagttatttcatttttactattaaataaataatttcattatcatatgtacatttgataaatatgtgctttttcttttatttctttacaaattctcggatggccaaacttccctgccacagtattaccaattctcattaagcagaaccattcccaaggaaccgcacccacaggacatgttttccattcctgcacgaaaaatctctaaaacccagggtgggaaggggacagcactcaaagcccatataagttaaaccacagcctgatacactcctcatgaacatcccaatgacagggaactcaaaatcattcaggataattttacatttctgccagttctattagaatgtctttgttctgatgtgaaatatttcatgtaagttcaaatcatcagttttagatttacctgttgcagccagaaaatgtcacatccctcttcacatccttcagaagtttccatgcatgtgttcaagattttttcctccctagataaaaccccactagttccttcaaaaatcccaaaacaacttggttgcttgattccttccttcagtcattatttattgtgtcatgccttatggtgggtacctgggatagaaatgacttgagcaggttctctgttaaagtctaatgaaggagataaatatggaaacatcactggtcttataatgatatgaacaaaatgctatgggggcaaaagggaaaactagtagctactgctgcttacagacagagaaggcctcaagaggaaataacccctgagcttagtcttggaaaataagtagaaatttgccttgagatgagggagaaagtttgtgaattcagaaaacagtaatgggttcacgagtgctggatcataggacagcaaagaaagattaggctgaaggccgggcgcagtggctcacgcctgtaattccagcacttttggaggcagagacggaggatcacaaggtcaggagatcgagaccatcctggctaacatggtgaaaccccgtctctactaaaaatacaaaaaattagctgggtgtggtggcacgtgcctgcagtctcagctactcaggaggctgaggcaggagaattgcttgaactctggaggcagaggctgtagtgagccgagatcgtgccactgcactccagcctgggcgacagagtgagattccatcccaaaaaaaaaaaaaggaaaaagaaaggttaggctgaaatgaccactaagagctttggtatccccccggttttttttttttgtttgtttgtttkttttagttcagcaacaagtaacagaaactacgcagaagagtaacagcagagcgaacgatggactggaaagcaaacagcctgaagaaaagggttaagtagcaaatgcaaagcagtagaaagggaaaaggaaagagcttatgagaaagctttcaagcagagtttaaagtctggcatatgactagagagagaaagagcataagaaaaatccaagatgacgctgacgtttctggctctgagtaaatgagtgtacaacagtgccatatggaagtaaggagatataattgagagtgagagagctgagctgaaaagagactaagttttgtgtaggacgagttatctgtaggacagattgcttatggggccgccagatggaaatgtgagtgcaaacctcaggtccagagacaccagtttaatgacatcggttttctcaaagttatctctgactctattccagtttgttaactttccttttttaagagtagtgccctaaactgagcaacgagaaaaaaaatgtcgccttcctcccaaaaggcctttaactactcccacggccacgtcactagaagctcattttgcctttgtcaatcttcacatgctagggtctccaccccagaatcagcgaggttctgggtcctatctccgagtctggaagcgaacgaactgcagggttccttacctctgccggacagtggatcccgccgcccgggcggccactgctttgctgggagagcgccctgaggatcccacgttagtgccactgggggtcggaccaggctgtagagggagacaagcagacagacgggtgagcgcggcaggcctgccccagaaccccggcctagacacccacacccgaggctgggggaagcaagggagctacagaggaaaagcacggcgcaaagcaggaggagtcagggcttctgggagaggcggggatcatggaagggccgccataccatattggagatgagggtggcaaggcgctgacgcggacggatagaaagttacggagcccccgaaagaccggcagctggcgagactgactcaggccccgcccccggacttgcaggcaaggtcctctctgaccccagggacgcctgggtcgtctcacgatatgcctgtagacagtctgctacagacaacttagttacctgctgtatgggaagtagagacctccggcctccttcctttggatcacaacgtccttcagaaagtccaatccctacsgaaggaaaaatataaccggggtcagacaagatattttctcaggcagttactagaccctcacagatttgcgctgatgtggcctaactgacgcacgtacggcagggcggggtcggcccgcagtggccagctgggagctacgagcgcggagcttgcgcagaagacccccatcagggtgcggggtgcagttgcggctccagggccatggcggaggagcagggccgggaacgggacycggttcccaagccgtcggtgctgttcctccacccagacctgggcgtgggcggsgctgagcggctggtgttggacgcggcgctggcgctgcaggcgcgsgggtgtagcgtgaagatctggacagcgcactacgacccgggccactgtttcgccgagagccgcgagctaccggtgcgctgtgccggggactggctgccgcgaggcctgggctggggcggccgcggcgccgccgtctgcgcctacgtgcgcatggttttcctggcgctctacgtgctgttcctcgccgacgaggagttcgacgtggtagtgtgcgaccaggtgaggcggccgcggggccggctgcgcgagtgcggacctcgccgtggagggcggccgcgggcatgacccctgagagaagaccttccctgtctgcggttcgcaaagatcggaactgacatggagaagtcagggttgtgagcgagcctgtggttctctaactttagtgtgggcccatttaaagttgcagattgctggggttccatcctccaggaagttttcatccaggtgccctgaggtggggcccagacatctgcattttaactgggtcatagggtgattccgaggtagatagtctttggggctctgagaaacgctggtattagaagtcagcttcagtcaccttttactaatgagtaactcgcgtgttgtcttcccgcttacctgttatttttgttgactctcctttcaggccatttgcatcccactgtccttgtgttcggagccaggccacaccgtcctcagcagtgtcatgtgttaaaaacgccaagctgaatatatcatgcccctattaaaacttgtacatggctccccattggtttttggagaaaagttcaagctttttaccttggtaaataatgtccacctggatctgccctgtagctattcttgactctttccttcgtgcatttttccccatcctaaaaaarawgactttaaaaagtaacatttactcgattaaaaatttagtagtatagaaggatgtaacctaaaagccccgtcctattctactccctgaagatagccaccgttaagtttctcttgtattttttcagaagttgtggtgacaccagcctgtgtcttttcataggtatatctatatcttcttattggtacataattggtattatgacatacctactattaggcatctttttcagcaaaaatttatttatttatttatttattttgaaacggagtcttgctctgtctcccaggctggagtgcagtggcgcratctcggctcactgcaacctccgcctccagagtagctgggagtacaggtgcgcgccccacgcccggctaattttttctatttttagtagagatggggtttcaccatgttggccaggctggtctcgaactcctgacctcgcgatccgcccacctcggcctcccaaagtgctgggattacaggcatgagccactgcgcccagccgggacattcttatgtatcaatattagagattcacttcattcttcatagtggccagaaaatccacttttgtttaagtgtgtcataattaaacattctccttaaaggacactaatgttgtgactagttttttgtgaatagatcagtgttgtaatgaacatccttttacttcttttttttaaaatatttttgtacttctgcaaatatgtcgtttgaggaaattcctaaagttggtgggtctaagagttgttcattttaaatatcaatagctactgccaagtttgcctaccaaggaggctgtgtcactttactcccccacaatgtatgatagagcctcttactccatgcttttgtccgccttggatattaaccattttaaactttgccaaactgataggtgcagatggcatcacatttgtatttgtgtttctttaattatgactcctgagttacttttgatcatccttgcttgcatggaagctttctttttaagtaacgtggacatttaccaaacatcctgcatgtgtcagtagacatgaggcagctgagactatagtgggtagaggaaaaattattggcttggaaataggcatcttggattcaagttccgtatctactgctttaattaagtggctttgaataaattgcacattatccctaaagttaccttcttcaggttttaagttagctgagactaaaatgacttgtaaagattacccaacaagaaagtctgtagtaatgccagcatgtagttcatgctcaatgatgactagctttaatatttattgagcacatactgtgtgctaaactccatgtgttttgcatatatcagtgcatttaataatcacaaaaagtatatgggttttttgaactataatttgtcaccatgttacagaagaggaaactaaggcccagagtgggataaattacttgatcgtggccagttagtagagctgagattcaaaccctggcagtcttgaatctagagcttgtgctctaaactactatagttcattcattcagttccttagaaggagaaagatcctagagcggcactgttcagtatggtagccactagccacatgtggctgttgagcacttgaaatgtggctagtctaaactgagatgtgctaaagttaaaatacaaaccgattttgaagatgtaatgtgaaatatatgtatatataaagtatctcattaatactgtttagtattggttacattttgaaatgataatgttttcggtaaataatatgttaaaattaatttcacccttaaaaacatttttaatattactagatttctattagacagcactatacaagaggaaatcactggacttgaagctttaaatgtttagcacacatctagcaaacgtctgtagccttctgtacaccaggcatatggtactgggtgagagtcttggggaataaaacagaatcagacattgcccatgaggagcccacagactagccagacggggtgggtgtctgtgtttttggtttggttgaagttgagttgaccactttatccgctgttgatttttgctttggctaggtgtctgcctgtatcccagtgttcaggctggctagacggcggaagaagatcctattttactgtcacttcccagatctgcttctcaccaagagagattcttttcttaaacgactatacagggccccaattgactggatagaggaatacaccacaggcatggcagactgcatcttagtcaacagccagttcacagctgctgtttttaaggaaacattcaagtccctgtctcacatagaccctgatgtcctctatccatctctaaatgtcaccagctttgactcagttgttcctgaaaagctggatgacctagtccccaaggggaaaaaattcctgctgctctccatcaacagatacgaaaggaagaaaaatctgactttggcactggaagccctagtacagctgcgtggaagattgacatcccaagattgggagagggttcatctgatcgtggcaggtggttatgacgagagagtcctggagaatgtggaacattatcaggaattgaagaaaatggtccaacagtccgaccttggccagtatgtgaccttcttgaggtctttctcagacaaacagaaaatctccctcctccacagctgcacgtgtgtgctttacacaccaagcaatgagcacttyggcattgtccctctggaagccatgtacatgcagtgcccagtcattgctgttaattcgggtggacccttggagtccattgaccacagtgtcacagggtttctgtgtgagcctgacccggygcacttctcagaagcaatagaaaagttcatccgtgaaccttccttaaaagccaccatgggcctggctggaagagccagagtgaaggaaaaattttcccctgaagcatttacagaacagctctaccgatatgttaccaaactgctggtataatcagattgtttttaagatctccattaatgtcatttttatggattgtagacccagttttgaaaccaaaaaagaaacctagaatctaatgcagaagagatcttttaaaaaataaacttgagtcttgaatgtgagccactttcctatataccacacctccctgtccacttttcagaaaaaccatgtcttttatgctataatcattccaaattttgccagtgttaagttacaaatgtggtgtcattccatgttcagcagagtattttaattatattttctcgggattattgctcttctgtctataaattttgaatgatactgtgccttaattggttttcatagtttaagtgtgtatcattatcaaagttgattaatttggcttcatagtataatgagagcagggctattgtagttcccagattcaatccaccgaagtgttcactgtcatctgttagggaatttttgtttgtcctgtctttgcctggatccatagcgagagtgctctgtattttttttaagataatttgtatttttgcacactgagatataataaaaggtgtttatcataaaaaagaaacagtattagattttggtctccataatctattttggtattgttacgaacatggatatgacaaccaaactggaaatcagaacactagggtaaagtggatattgaaatgaagcaagaatattgtcacacatgtgttgtgcatcttgtttagggtatatttcttaatgtcatctaggtcattagttttgttaatatttgtgttgtcttgaccaagctcctactaagtataggacacaaatgttttttatcttccaaggcctggctcaaatgccactgctgcaaagctttctttgaccctctggccacctcccaagccagaagttatcttccccctccatgtactctagccttttcatgacactgatattttcgtgacactgacttatagttcactgtttacctgttggtctaacagcaaatcataaacagtagttttcaacatacttctaaggctaaattcatttccagaagtagcaaagcttactagccaaaggctccacatttatcaactcttaagagctagacttgagagcctaacagcctatatgattttgtgtaaattgatctctatacctcagcttcttcatctgcaaagtgagataattgtactattctactttcctcatagtgcggttataacagattatgataatattacaaagtacttaatacttggcatatagtatatatattagctattagtattttgcaatttggggatattgaaaattagaaattgcatgttagttcatgctgcactaccatattgttcttttggggctcttcaatgggtgaaattccattttacagtttatcatgtgcatctgtatcacaggagtattttggcaaaatgattctgtaccaaaaaggagtactataaaatgagggtgccaaatatattgagtcttttatgggattaaaagttctgttgcattccattttctttggcattgtgaaagcttaccatgtagtacagaaggtatgatttggttcatgtgtttctgagaaatgcagcctttccaggaagcctggtggctcttaccatggagtttagcacagatagacttggccacactgtgacctacaacatggtgcttaccttactaagcagcactaaacatttgcatatttgaccatttttatgcaaatcctttcaaatggactacatgggttcatggaccctgattttagcttcacttcattgtcctaagccggagtgagtgacaataagatttcacaggtctgggagggatggagtcctgcctgccatgagcttccagcttctgaccattagttcctggttcctggaccctagaatggaactttgcccttaagaagtgttcacaccttccaaaactaagctgaagttagggaaagtagaagcatgaaacattgaaggtgaattgttggggccttatccatagtaattctggtaattactttgtgcagggcaggaaaggagatacatacatagcagatgcttaatcctcaacaattcactgagatgtaggtattcttcccttttagatgaatgtagttaagcaagttgcctgcgtcccatggccttgaagaatggacagaatctcaaggccctctgattccaaagtccaaccactttactattcttcagtctgccctcaccctaaccaaattctttgtgtaatgttttttcagtacaactccctctgcagcactgcagttgtagttgtacaggtctttgggtttagaaagactttgctgtttactgtccatttgcctcttcccatcagtcttccgaggtgagtatgattatcccccatcttacacacaagctcagagaggtgaaagacttgcctgaaggcacacaattgaaaagtaactgagccagcatttggcccttagttacctgagccatccgggactttgcgcataccagaatttctcagtctcctcctctttgatatgcgtaaatatcatttgtccttcatacatacacacataaaaacacgatgggccaatagaagagggagtatcatgtccataaagagacccactcagctaagggggagtagtagtgcagttctttgatccaatgacaaatgtctactgaacacgtatttggacagcctttagagcttttgcagagctcattagagattgtctcgtttgctcttcacagcatcctttcaggtaattataggcatttttagagattgaaagtctgaggcttacagctaggaagcagtggagctacaattcaaacccaggtatgtccaacttgaggttaacagttcttttagttgtactacagttgcctcttcagcaaatgcttcatgaccagcctgaccaaaatggagaaaccccgtctctactaaaaatacaaaaaaaatagtgggatgtggtggtgcatgcctgtaatcccagctacttgggaggctgaggcaggagaatcgcttgaacctgggaggcggaggttgcggtgagctgagatcgcaccattgcactctagcctgggcaacaagaacaaaactccatctcaaaaaaaagagtaaaaacagcaccagagcacttcactgctccactctgctcactccatctttaatcataacaatcagcccttctctgtccacctttgccagggtcactaatcatcctgtgatctccttcctttgcatttccacctcccagaatcaaagccagtcaaatctgactgggaccccagaggccacctaacctaatttggtattgcacagatgggaagacaagcccagaaagaggaagggacctgtctgaattcacacagagggacagttgcagccctcctctacttctatcaaaaaccacttatattctatcacttcctttgaaccccttactccattcctaaccttaaccctctcgaactctgtccccaatagcctgagaaggtgtcaccctccagacaccagtgctctcatgcctgtcagctaaggggagaggagtcttcccaatgacccactttytaaactgtccttgataaagcatcagctcttgggaggtaggggaagggagaattttaccatcctgacccctgagccaaggggctgctggagccagcagctctgtttatgccaagaggactggagttttggtgttggtatcacaatgagagtgtccaggccagaaattttttgtttatggtttctgatatttcctaagttagattttttttcctcagaaaagagaaatttgagcaatgaactataaaatagtcttgttggtcatttatgtctactaagttttcaacatagtagacatttgtgtttccaactaatgccctgtttgagatatatagtttgttctttataatccttattattatatactgagattactccagcttttttctactataagcagtccagaggaaaaacaactgactttaaattctaaaagcaaatatttaaagttttaaaaggcaaatttgaaaagcaaaaatgaaaaatctaaagaaaaagacatgaaaagattgcaaaactgcttagggtacacgaaaaaaaaaaagcaattatcaaaaaaaatcactggcgatgtttattttcaaaccaaatgatcatgttaaccagcttgctttcagccaaattgtatgcttcctttgcgttagagaacctggaaacctaacttaacacttcaattcaatagagtaatacatgatcatatgttaggttatatgggcaaatatttaaaaattttaacccaaccctagcttaggcagaaagggaagatttttaggaagctactgggatagattgggtaattcaaggaaagttacagaattgaatcaagagaagtacagggatgtagctaggctagatgttcaaatgaaaccaggaattcaagtgccaccagaacaccatttctttatatgatacttcattgtctttcggtatagactaacttctcttttgtagcaggaaacatgctaccagtgaagccaagccctccaccttaatacttctactaccaaagaggaactggctctcttttgcagagtttgaaaaaataacagagaagggttaagatggacctttcctggttcaggtgcccttaaatcagtgaagcaaggttgagaggcaaggtactatgggttgccagattcaggtcagcaatctaatcttgaacccatcaattgtggccaagatctaggatcatacagcagcagaaatcatatcgctgggagaagggaacagagtgtatattgaggaagaaattggaagctgttcccagaagaaagtgagataaagtaagagatcccttaaaaacttatacctagttggtggtatgagtcatcagagaaaggcataagccaactagaatagttcctaaatgcagttttaatcttgtttgcaattattttgaaggggtaagaccatctggatgagtcctaatcatccaagagaaaatatattattatttaatagaaacttggtcagctgaggcagcttagggacataagcctgggaaaaagagacctaggggaaggcttcaaaatggctgactagaggcatttgaatagagcatccaagagaacactagaattcaacagagaagtgacaggaaacagttgaggcatggaaggagagggaaattaggcaactggctcagccaggattggctaggtgcccagagaggctagtgtggggaaagggagagatccccagtgagagatccccagtggtccacattcccactacagacttgcaaccctagccatgggacagcccctggatcttcatgggcccagagacctaacatagggagctgcctagagaccacgcaacagcattgctcaagggggagaacgcatgctgggtcccatgtgctccctgagtcctaagcagctatagcatggcaccgttttgcaagcccagcccacaccagactgcattctaccctggggcaaaatggcccctgcatctccacatgcctggagcgctactgatatacccccatgtacacccagaggtctacaggagcacaataccaaatggacccagcagaataccagggttcccagcattctaacacacacagtgtcctacaccctggggaatgagtggtgcagtggaccagggaagctacccctgggacaaagggaatcaaaaatgcatgttccctgaggcctgataactgcctacctgggagagctaccacaagcagcaactcaactgcccccagcagaggagctgctgtgcacatgccctgaggacaggctctgccactgtccactgcagccactgctgctgccactgggaaaccaaagcatatgccactggcagtgactccacctgccaacagcagggccactgctacatagttgcatgtgccctaaggacaggctcccccaaccattgctgctgctgcagccaccagaacattccaccaggggtctggggagcaccctgccctgcccaacacagccagcacctgaggacaccaccaggaggcctgaagacaggcctgcctggcctggtacaacccccacctgccatgctcaagcacactacctgggggtatggggattgccctgcctcattcaccaccactggcatctgtggactcctcccaggcacctatggatgggtctacccagccgtcccctactacctcagcagctcccctactacctcagcggctctcccacccccacatgcaccacctcccaagcctgttgcagccaccgctaacaccaacatatgctgtttcagagtccaagtgttgtgtcaccactgctactgccattgcctatgccacatacattatccaggggttcatagactcagccacacacccagcctaccactgtcactgccagcactatagcaagggactcctggcggtccaagaatcggcacgtttggacccccaatgctggtgttcacatacatctggaggcccacggaaagacacacttggctcgcaactggggcataaggactgataacctggcatccccatcctcagtaaaacctcaccacagcctccactaacaactacagcctaagtcactgaggaaatcacagacaccaccaatgctttttacactagaagaaatcatatggagactacactactgcatgcacccagaagcaaagctaaagtgctctacccaacaccatagatacatctttaggaaagagtctctccctatcaaaaccaatccaaaaaaatggaagaagttactgttaaaatagatgcacagatgtcaaagtaaggacacaagaaacaagaaaaagcaaggacgtatgacacctccagaaaaaaccagtaattttccagtaatagattccaatgaaaaacaaatttataaaatgctgaaaaaagaattcaaaataataatatgaatgaagctcagtgagatacaagagaacacattaacaattacttaattgtattgagattaacaatacagtgaaattttaaaaattcaggatatgaataagaaattcaccagagatatagatagcttaaaaaagaaaccaaagagaaatccaggaactaaagaatttaaggaatgaaatttaaaagaatacacttgagagcttcaacagtagactagatcaagcagaagaaagaatttcagaacttgaagacaggtcttttgaaacaagccagaaaaaaaaaagagagagagagagagaaagaaaggggaaggggaagggagacagaaaagcaacagaaaaggagaagtatgaaaaaagaagaaaaaagtgagcaaatatctgaactgtgggtgttccagaagatgaagagaagaccaaagttatagaaaacctatttaatgaaataaaagttgaaaacttcccaagtgtaccaagtgtacatccagatacaggatacaggaagctcagagatcctcaaatagatgtaactccacaagttttctccacagcacattctagtcaagctgtcaaaag

SEQ ID NO: 95474 - DNA, 78389 bp, Homo sapiens
tgctaaccatcctctcagctttttacggctagcaatgtgtttgccacatactcatcaacagagggcagtagctcaccatcattggtttagttagcctgcatggtactttcaaggatggacttgtaacagacaaatgtatctttctgtgtcgtctgttgtcgtttcctcccaccaagtatgggagaagggaggagaggaactactaagaagcagtcaacaaaaatggtaaaagtatgcttgaatctaaacaaatattgaccctataaacagaaataataatgccttcaagagttacaatgtgtgactataaaatacaagataacagtggcatagaaatcaaaaggagggtacatgaagttagaaggttgtaagaacctggaattatctggggaaaaaaagataaaaaataacaattaacattagattttgatatgtgaaagatgaatgctgtactatcgtgggcaaacattaaaataatatcagtaaagctgtgggaaaataataaaacaataagttctcaggtccctcagagtaagaattaatcatagtcatttttggactcatcacaccaagctcttagcagagccagtttgtggactgattaagtttctgctctctaacttctagaacagtcagtaaatgtgaaattaaggaacaaaaggtagctttcttaatccatttatgtcttcttaatacttattctccgtctctctttgagacaagttctcactctgtcgcccaattgttttttctcttaatgctaaccatcctctcagctttttctgtttgacaatgtgtttaccacacactcatcaacagagggcagtagctcaccatcatctggttaagttaatctgcatggtactttgaaggatgaacttggaacagacgaaatgtttgctgtttcctcccaccaaggatggggcaagggaggagggaaagaggattttccattttaaaaagcacttagagccaggcacagtggttcacacctgtaatcccagcactttgggaggtcgaggcaggaggattgcttgagctcagaagtttgagaccagcctgggcaacatgaggagatcccacctctataaaaaattttaaaattagctgagtgtggtggcacacacctttggtcccagctactcaggaggctgaggtaggaggattgcttgagcccaggaggtcgaggctgcattgagccgtgatcctgccactgcactccagcctgggcaacagagaaaaatcctgtctcaagaagaaaatttaaaaagcacttaaactgacatgtggaagtaatctcatcataaactggaattagaaatgagtcaaattagtgacaaatttttatttttactctcatttgtcaacattaccaaattattttcttgaaaaaaatgttttattttgtgtatacctaaataatttaaaggaccaatcctgcagagtacttccctctcccttctgaaaaatatataacacaaagtactcaaaaagtatccagcaaattaacacatgtgaaagatggtactagacacctaggaattatgtaccaatcctggaattcatactcaagctgcccctgatttccaacacctccatcccccagaatgaggactctctttacccaggtgtccctacattacatggctgcagcagggatctctgtgctatcatcagggagaacaagccctggaaatacgtgaataaggaattccagcctatatggtgatagaacaaatcttttctctagaacatttaagtccctcttctgcaaagaacaaataatttacagcttcagggtatctgatgattttgttgcataatgcttaaaagcacaagctatggagtgaggccagccttctctaaaaccccaggatcaccctttaagtttcatgactgaagcattctgtgtaactactctgaatctcagtttcctcatctgtgaaactatggcaataacaatgttaccagcatcaacaggcggttgtgaagatttttattattagctgtattgagaggaatggtgcttaactgtaagcagctgcccagaggattcttgttccctgggaaggcagttcagggatcaggcccttaggcagtaattaagagagcatgcaaattaagcgtatagcaggtgtggtgagaagagggcatcaggggagagcagttggctatttaccgggaaccaagatgaggctaagacctgcctctccttgttatgaatataactttgattttaagaggaacaaaacatttatttcaaattttctctagtatgaagacatatattcagtgaaaaatttagggattctaaagtcccctcaaagcattcaggaggaccattttatacttcattcattgccaaacagatgtcttccctccgtgccactctagaggactctgaacagcgcaaaggccaacagagagcaaagggtaagcaatagaaagacactgacagtaagtcagtcaacaaacttgtattgagcacctactatgcaccagactccatgttagggatgatgaacaaactgacatgggcccctgccctcatggagtgtatatttctaggtaacaggtctttggtgccaatctggggacatgctacagcagaatcacctgtggtaaaaatgtagcgtattcagaatctgaacacagacccccaccctgacctaatgaatcagacattctaggaggcagaggatacaggaggctatatttttatcagtgccctatggtaaatctgagaaacacccagattcggagaactaccattggtgtttctcaaagcatggtcttttgaccacccacatcaaactcagcctcctaagagcacaacacaggcacgcatgttttcaatgtaccccaaggtttgagaagcgttatgcttgactttttctcttacacctctcccttcctattaaatgacatgtatgtgaaaatgcagtataaattgtaaagcatgatacaaagttagttgggtatagttcctaggacctttcaataaactgaggaagtccagcatatacaagtaactgaaatcggtgtggaatatgatgaggcattcctcagagctcaacaggtctctggcagaatcttcatggttcttcttatagcagcagagccttctagcaggtaaggctgctaaaacaatacctgttacttcaaatgaaggtccttctgcctctgccccccaccagagcacagctggggtgcctgagcagttacatgcttgggtggcatcctctctgaaggtccctagagtatatgccctcagctgggccattagcagaaccttttatatcgtgacagaaatatttgttaggtggaccctgtgagagcgtagtaatatgccatggcaatataccccttaaacatttagctttctcagcagatcatgaaatacaaattcgggatgcaggattaggatgaaaaagaaactagatggataggaggggagagacagatggttagagaagacactaaattcccattttagatgtgatgaatgacaggcactgatatggtttgtaatccccacctgtggagggaaggaggtgattggatcatggggatgatttttattattagctatactgagagaaactgtaagcagctgcccagaggattcttgttccctgggaaggcagctcagggatcaggcccttaggcagtaattaagagagcacgaaaattaaacgtatagcaggtgtggtgggaagagggcatcaggggagagccgttggatatttaccgggagccaagatgaggctaagacctgcctctccttgttatgaatttaactctttttttcttaaagaggaacaaaacgtttatttcaaattttctctggtatgaagacatatattcagtgaaaaatttagggattctaaggtcccctcaaagcattcaggaggaccactgtgcattcagaggacactctcttgcctgctgccaggtaagacatacctgcttccccttctgccataattgtaagcttcctgaagcctccccagcatgcagaactgtgagccaattaaacctccttccctatgaattacccagtctcagggttctttacagcagcgtgagaacggtctaatacagacacctttggaatatccaggtggggttgccacatatggctgcaaatcaagagtgtgaaggtcagaaagttaactaagaccaatgacagagacatagcaggcttcagctagaagtggcaggcagtctgcatactgagaaaatagatgaagaaaaactcagcaaatggagaaacatataaagcaagaggagagagtgtagggaaagaccttaaaaaagagggacaaaagagggaagaggtgactcctaagagcggagggctgaaaagccaaaaggaggttaacatttctaggaaaacgaatcgccagtgtcaaataccacagagtagtgagtaaggacaggaacagaggacaggccctgggattcacgatctgcacgtcactggtgacaacgtccaagagcaacagactggggggatgtggaactatttccttcacggttttgaccagcgtgcttactaataaatctcaattcccttcatagctctgatttgattgttttctgcgaaggattctcagttacacggatgttatcattgaacattagatactttgctttccgaatggctgcctcattaagaatcgcaatttagctggatgtgtcctcatcggacttccccagccttctactcactctcaccttgcccctactctccctacctcccaaggggactggagcatgatttttcagggattgtggtgcacctctgccatatggtggacattcaaagaaaatttaattactaatgtgaatggaaaggatttaggaagtgggtgggaaaacagtctcctctcatattggaaatacagttacttcccctttcaaaataaatataagtatttatatttcaaagttaaatataactagacgatagttgtaccctatagtgcagtatgacagggaaggtgtaggctttggtgtcaaaccaacctaaggactgagtctcagctgttgcgcattgcacacctgcaaagacaggtaatattctttacttgtaaggtggttggaagagctgaactgaataacgtggaaagagtcgatcacagggctttgtgcagaataggagggcagtataaagtagcaggggggctattagtactggctattgtttactcatcctataagctgcttattcagaaaactacagtaactttccaaataatttgggcaggaaaacctcaccacctttcatctagaaagatctaatcacttctttgaacgccattcacccaagagggcacaactcctaccaacatgaaaagcagatcttgtgaaagcccacttgctgccatctcccagccatttctccgacttcagaccggtgaacatcgtgcattagaaagtgttgttacatgtccaaggaaatctacatatagaacttttgccacggaaatgctgaagtcctattctgacagcgtgactccgatgtccacttggcaggctttgcgcaaagaattaaggcgagggtggagagggtgggtagggtggggacggacaaagtgagaagggaggcgggccaagtgaccacacgtacatgaagcctctccagttatggccaaatcattttttaaaaataattccatttcttccccaccctttggtcacttcctaacgccggctggggagtcacatgctaagctccaaagtgagcaacagacaccctcgtcccaggtcccatgctggcagaagcggacccgggccgagggatcagccctcccacttccagcggaggagcccttcgcaaccctagcctccagcccggggcgaagtcctccaggcccgcgggggcgcccgcaggctccgccccttcttcggctagctgcccgtccgtcccgcccctgctccgcccttcccgcccctgctccgcccatcgcgcggcggccccgggggcgagagggggcggagcgtggaggcggcagctggaaccgcgcagcgcacgggaacgcgtcccgctgcttgggtcaggttcgccggtcgcgggagccccgccgtgcagtcggaggtgagtaccgacgcggcccgacccacgtccccaggcgggagcgccgtccaccctgtatccctcgagagtcggtgcgggcctttaccgaggtrcccgaggcagtggcggcmcgggggacacggaggcgagcttggggaggctgagaggagaatcggggacgtgtttctggcgactgacgtctccaccctgtccccagtctatgtcatgccggggagagaaaccagggattggaagtggctttcctagacccttcttagccttggctgtgcgtgctgtcctgaaagtccttgcctagggtgtgcggccagtcctgggagtcctaaccccgagggtgtgaggcccgcactgggagtcctcgcccaggcccggctggctggatagggaaacccttgctaaagttgtgcgggcagatccgggaatccactccaaggggtaaagggaaaatgggatgagggggaagagacccttcgtgggaggcttgaacacagagcccaccatgatagattcagagatctagaaaggagcttgggctgcagttatgaccaagtcatttttttctagattcagctagcacatcataatggcatcttccttcttgcaacacatgtaactctcttccctgggggacaacctctaggacagaagtccccaaacttttctggtactcagtactcctttacactcttaaaaattagtatcttaaggagcttttatgtgtgttatatctatccatatttataatatgtaagtaagactgagaaatttgtactataataattcatttaaaaagaatagtgaactaattatatcttaacattgcctatttttatgaaaaagaactatatttcccaaaacagaaaatgattgagaagagtggcattgttttacatttttgcaaatctctttgatgtcaagcgtaattgaagacagctggattctgatagctgcttctgcagtctgttgcaatatcacatatcatgtagcctcttgagacctccactgtatactcctgaaaatgtgtgaatgaaaaaaagcaagtaacattttattactaggaaaatggttttgactttggagatccctaggagttctctgcaccacactttgaggatgctagtgtaggaaatgcttcagaggcttcattcattgggcctgcttcttgtttgtgatccttcctctgattgggaacacacaccacctcatgccatggacagtattaacctctggtatctggaaccaagtttgatctcactttggaaaccatgtactaggtccccacgtgaggctgtgatgaaccttgccagcctcctgaaaagtcagcaaggcttcgcacatgcctttggttgtctctgtgcttgcagagctgacctgtctgtgcatcaggattacaacagtgatgtggcaaacaggacctgtaggctcacaaaagtgccagtggggagaccatgccaagtgtgtaggggttcctgtgagagttaccaagtagtcaggaagttatttccaaaagaacaaggaggcatgcttttgccttcccttgcacgtgttcatttctgtttgcagttgcatggttattagccttgagtttattggaataatgatttccagtcttgacgttctttcactttccactttcagagggtgtcactctgagtggtgcttcctcagcccctgtcaaaaagcagtttccaccatcctggagtgtggtaggtgaggtccttcacgggactctttccttagcttcgtgccttgtcagaacaagttcaagacagatgttatgtgtatatatttgggaggaagaaattttctaactccatcctcccttttgttccttcatccatagagcctcttgtgctctgatggatcagtttaaatgctacagccgatacttgagaaatgttgcatgcacatgagcgtgttgtgtgtgttgcacagtccacaggtgaggaggaggagaagtccacaggagaaggaaatgggatctaaactctgagcacctgctgtgttctttgtattaaaaaattccactttgatggtggggtctcattccttcattctttcagtagatttttattggccacctatttctcatgtgtccagttatgtgcgggatgccaggaaagtagtgagcacaaaagatgcagtccctgtctttctggcaattatggtctgatagctttgataactgctggttaattgagatagtctattatatagtcagagtgtgtacatgaaagctggtcctgtgtgaagagcagtaccccctacctaaagtgtgcttcaaaggcatgtgctgaagaaaccagtcccacactgtgaagatgatgataaaaaccaacgtgtatcaccacgtgcctggcaaagaacttcctttgccttctttcccccactcttccttctacataggaagtaatttcctgtgaggcagccagattcacagggaaattacctccaacctggtgccagtcactgggccagcctcgggttaagacactttctctgggtctcagtgtctttgactttaaaatgaggagttaggccattgatagtaagtgtcccaaggagccagtggtttcagagctggtttatactagcatttgtgcatatctcttcctaactccgtgttcagtggcaacacattttttagattgaaataagccatggtgggaataataacaccatggaaattggcaaatgctacatcagagcttttttttcctcttggagttcaagttgttaaacctttgccagctgacactgctattgtctgagccaaggtgcttttggtttgtttttttagtagaaaacagactctttagcctagacaaagatcctagatatagggtgtatgattcaagtcctctaaaatttttgataaggaaaaaaatctgttttcatcatattctaaaatatagatcagcaaactttttgtgtaaagggacaggtagtgaaatattttaggctttttgggttatggttatacagtttctattgcagctactcagctctggtgttgaagcacgaaagcggcaatagacaacatgcaaacaaacaagcatggctgtgttccagtcaaacttgatttacaaaaacaagggccagccatagtttgcagactcctgacctagactatcagaacaagaaccatgtttcaaagagagagttttatggaaaaggagattcttcaggactttatgcgtgaataccagaaacttgagtctccaagatggacgtagcgggcagtagtaactgtagaggatttggaatcaatcatggaagactccatagtaggttgtttaaaggaaggccaagtgtgttgaagttttgaggacagagccacatatgggtcttattcccaactccctccctggagccatctcagatgttatgctagaatggatgtacctgcagtctaacccgttgtgtgaattttgcatattattatgcaaaaactagtagtgtctctaagagctgtcttgattccaggggcagagacaaaggaaatgttaaaaaggatggaaaggcccaggcaccgtggcttacgcctgtaatcccagcactttgagagtccagatcgcttgagcccaggagttcaagaccaacctgggcaacatgacaaaaccccatctctaccaaaaatacagaaaaaaattaaagccaggtgtgatggcacatatctgtagtcccagctacttgggaggcagaggcaggaagatcacctgggaagtccaggctgcagtgagccatgattgcatcacggcactccagcctgggcaatagagtaagaccctgtctcaaaaaaaaaaaatcctcgttatatatgtatatgatacattgtagagtacactgtgtgtgtatacctgtgtgtatgcatatttgtacatctatgtgtacataagttgtgtgcatgtgtcattacatattccattccatgtatttaaagtagcatcatgaatgtttagaagatagaccagtagccagttctgggcagtggaatgaggtagaaggaagccagagaacttttgttacttttcataataacagatgtgtgcctatcttataagggaggatagcctgtagcattcatatattgcttttacaacatagtaaacctaaaatcccaacaacgtatactttcggaaggaaaatagagttatttctctgataggaatgttgccaccatcctcctcccccaattaaaaaaaactgctttgtcatatcacagctctgaacttgtatatataatattagtataaaaataagagagagactctcaagtcaaaacattttatttaacagtattaatgtttgactcttgtccagggttagtaatactagttcaaagtgttccttagcaagctattgtgcagcctttacactggtgttacaaaatagtgttgtatagtttttaaactaaaaaaagcatgttacacagcagtatttccctgtgattctgtatttctgaggagagaaagcatgtgcatatatgtacgagtgtgcccctgcatgtacaaaggcagcggatatgccaaaacattgagtgcttttctctaggtgatacagcacacttgctttttagattttcttcattttagcttatcggggttttcaagcatgaataaatattacatttgacattaccaaaatcaacccctacagtatgtttayacctggtatgttgaggacagttcttccatctttcttaggctgtcttaccaccagcttacctggtrgcagactccagctactgtctcccagtgagaaatgtgaggagtgtgaggcatggcgaaccgaaaaacaggcacacttaccatgtagtcacattgtgctgtgtctgcttcccctgtagagtctgtctgaccttggcctcgccctctcacttcagttgactggcaccatcagctgaccgtctccctagatcgactggccttcatttcttttttttttttttccttttctctatttttaatggaaaatctcagacatacaaagtggggaggagagtataaaccctcagcctcaacgactgtgaacagtgataattggccaattttgtttcctctatactttttttttttttttttttgagacagcgtctcactctgtcacacaggctagagtgcagtggtgcaacctcagctcactccaacctccacctcccgggttcaagcaattcttctgtctcagcctcagaatagctggaattacaggcgtgcgccaccacgcccagccgatttttgtattttcagtagagatggggtttcaccatgttggccaggttggtctcgaattccttacttcaggtgatccgcctgcctcagcctcctgaagtgctgggattacaggcatgagccactgcgcctggctcttcccttatacttttcttcaacatcacctctttttctttctggcaagagttggcatcttcatttgcagctgtataaattaacgagaatcacttattaggtcttttaggaataagcatgtattgactgctgtagcaaaaatcttaaaactgttctgccctaatgtcagccatactgaactgctgagcagcccctgaacacttgctgcgctatcctgtttctctactttggtatttgctctttactctgcctgtgcatctgaattcatcttccacttcgtagttctctgtaaagcctttcttgaatcccacttgtagctgtctctttcctttgacttttcttataaccctcatcctattgtatttgtgtgcttatcttagtctccttgtcagattgcagtcttcaaataagagaaggaatgtgtgcctatcttcttttcctctatggtatttagcaatgcgtaatacaaagaagatactcaagaaatacatgctaaaataatttgaattgattaagttcactggagaaaaattttgagtataaaagaaatccatcacattaaaagaaaaattttcaaatatgacctaggaccaagaacattttctttcatctgtttggattttaaaagattttaaagaatcatggtgaaaagagtcttaaatttgagccatgaaaagagtcttaaattcgagccaatataaaaacgtagctttctaaaaagaaaatgtttttaatgatcttttgtcattttttcacaaatatatctggagcctgtgggtcttctctaatcatacaatgcatcccctcacctccccccaccaggcgaaagacctgaaaaaatamaactgaataatattgggtcacttgtattggataagagtgattcttgactatattttaaatacttgttttagaatgtatatttaaatcttcagtaaaagaaacaggctacatttagagcttaccataggtaagtcaatagcaatctcatgaattatggtagctcacggggatatagttcccagaatatgcagtgctttcgtgtgttacctcatttaattatcctagcagcccttgtcatctgggcagagcagtgcagacagacattgttacctaaaatctgcaaagaagtaaactaaggtttaagaatatagaagaaatcttgtcctcagcagcaagtggcagagactgactttaagaatcaattggaaaccaagagtctttgggattagatgttgcaaatatgtgaagacgcaaaagcatctaagcatgtctttgggagacggaacaggttcttgtgccccttaatgccatagacctattgaaacaatatcacactctctgagccagttgttcctcagattcctcatgttctgctgttatctttggtgtcaaaaattaatccaccttagatgaattagtaaggctgtttgtacatgagtgctggtgtggttctctctcatcctcttgtcttgatctaaggagaaccctgggcaagcccatctttggatagtgtaacttgtctgggccactgctcgcaaaacagacatgtatggaacacttaattattcaacatccttgtcatcctttctataactgctattgtggaattacatggcaagttgcaagttgtggcatagttcatgaagaagaggtgtcagtctaggaaagtatcctcctacatgattascaggtttgaatttttggttcagaacagataagataaataagccattgccaagaatctgcgatgtacaagagctatgatgggtggacatttgaaaggtacaattttgtattaacggcagaatcaaaagtagcctcaggattggttttaaggatgttatgtttcataaacccttattttcttagataagaaatcagtctaagtgctaataatgcctatattatttacatcaacccattctttaaaagttaccatacaaattttgccaaaatcaaggatgttttagggaacatgaggtttaccatctcgtccccatatatgtgctttagagcttggagattgttttaaaatgagatttattttttttaaatgcatttggttttttggatcttaatatgttaaatgactgtaaaatgatatcacttgtgcagcctgttgggaggagcatggtgcaagagagttggttctgacatcaggagcctgagtttgacttccagtttggtcacttaccagccatgagaccatggcaagatacttagcccrtcagatcctgtcttctctcatgtgaaatgggatggtgatgcccttgtcacaaagttgccaagggtctgcattagaggaattggattagatgcctggcaccccacrggcactcagcacatgtctccaggctgctgagcttctgggtgacctggcactcatgggataatgcctgaacattgctgctgttcttcccagcttctgtcccagtccaacctgctaagctccaggcccatatatgcccctgcccgcaggagatcttatcccagatccaccgtgtctaaaaccagcatctcagttcccatcttgttcattggctctgccagtttgcccaaatgagaaacacagaagctattcgagacctatcttttttccttacctaccccagcccatcctgctttcataactgttgcgggaggtcagggaccccgaacggagggaccggctgaagccatggcagaagaacataaattgtgaagatttcatggacatttattagttccccaaattaatacttttataatttcttatgcctgtctctactgcaatctctgaacataaattgtgaagatttcagggacacttatcacttccccaatgaatacccttgtgatttcctatgcctgtctttactttaatctcttaatcccatcatcttcataarctgaggaggatgtatgtcacctcaggaccctgtgatgattgtgttaactgcacaaattgtttgtagagcatgtgtgtttgaacaatatgaaatctgggctccttgaaaaaagaacaggataacagcaatgttcaaggaacaagagagataaccttaaactctgactgccggtgagccgggggggaaacagagccatatgtctcttctttcaaaagcaaatgggagaaatatcgctgaattgtttttctcagcaaggaacatccctgagaaagagaatgcgtccctgagggtaggcctctaaaatggctgctttgggggtggctgtcttttacggtcactgctgtagggaagaaataagccccagtctcctgtagcgctcccaggcttattaggacgaggaaattccctcctaataaattttggtcagaccggttgtctgctttcaaaccctgtctcctgataagatgttatcagtgacaatgcatgcccgaaacttcattagcaattttaattttgcctcagtcttatggtcctgtgatcttgccctgcctccatttaccttgtgatatcttactaccttgtgaagcatgtgatgtctgtgacccacaccctattcatacactccctccccttttgaaaatcactgataaaaacttgctggttttactgctcagggggcatcacagaacctgccgacatgtgatgtctccagctttaaaatttctcttttrtactctttccctttatttctcagaccggccgayacttagggaaaatagaaaagaacctacgtgaaatatcaggggtgaatttcacccaatacataactctgcctggatttgttccctcctgtacctcctcattgccttgtcttattgactgtaataacacygtaacctgcctcccagacaccagtctggcagcctttccctgagttagtctatacccctaccggaatgatctctgaaaatcaaatctcatcttaaagattgcagctcagaatcctttaatggtgcctccttacctttggtaaaaattcaaactttgcagcaacctggaccttgctccatcccttgtttcttagctctccccaacatgtaccctgtactttatccacgtgcaacactttatgattcccacaatgtcacacttttgtgcctttaatgtattgtttcatctgccagcttattctttcagtgactctgtacctctgtgtaattctggaaggcttgtgcatggtgtcacctgtccctagagtcctttctctccccctctgatgctctgatgctggattaggtgcttttccctggtggttctttatcagccttcatccaccacacctgtagcatgggctgcatgatgttctgatttctcctacacagtctccattctcagtctgagcatctgaaggaggatggggactttatcccttcatcycaggtctgtaaatgtcgtgtgtatgaatgaatccacaccagtcccttcccatagacaacatagaaaggcccaggtcccagaagtatcaaggtctaatgctgctttagtatttgtcactccttcaacccagtgaaatagagcagctgtgccattgtgggagtcactgggatggaaccagctgcttcagagctgggctctggagtctgatggacttgggtttgcgttccagttccctctctcagcacgcctgcatctggcttcagatttgtagcttctaacatccttctatcctgctgcggggaaggaatgtgctgatcagaaataggagcatcaggtcctcctgacagttgcctttcttwggtaraatcagtaaatatatgggtttgcatattgagctctgagaattttattagcatgagtcataatccccgagttcagtcagccctgatgagaccaggttggtgaggtggctgggtatagttggcctcagacacttggcgaattcacagaggtaaagatggccctataagacctctgacagccagacacccaatctcttgtggtgatggcctttctttctaattcctaattyctaaagtttgagttagaaaagttcattgccacaatctgcgaaatgagttcaggagcctgaggaaatcatgctgctttcttaaagattggatctcaactggacctgctttgtagtacttttttttgaaagtacagctgtcttcacccactacttctcctcctcttaaaacataaatgcaggctgggtgcggtggctcacacctataaccccagcaatttgggaggccgagatgggcggatcacttgaggtcagaagtttgagaccagcctggccaacatggggaaaccccgtctctactaaaaatacaaaaattagccaggcgtggtggtgggcacctgtaatcccagcgactccagaggctgaggccagagaatcacttgaacctgggaggcagaggttgcagtgagccgagattacgccactgcattccagcctgggtgacagagtgagaccctgtctcaaaaaaacaaaccaaaaaaccaaaaaacttagatgcagtagggcttagttgaggtatctgcaggtgtcatgtactacaccacactggtgaccatagggagctgcagggtagggggcccacattctgagaaggggctgaggaagacctcaaggaggagaggatgaggtcaggctcagggccgggtcagatgccgggttctcaggacaatgcccccacttcttcctttactttcttgccaaatgtttcatgacccttggtgactttctttctcagcctgtctctggaatttataaatgtcgaagttcaccaagactttttacgaaactctggttatattggcccacagtgacactaaaaagtaaaagtgaatatttctgtgagtttgtgctgctgcaactaatttaaaacgagcttagaggatgtattaagtctttctctttgagacttgcatgtgatgttctgccccctcttggccagtgagcccagaactaggggagccctcaagaggcaggggctgcctggtcaggcattgctatagcgtggccctggttccccaagtcctgttgtttttggcagtggctgtacacatctgccgagtgagtcatgatcatttttgtgatacatcctgagaatttccagtgttacttaataatgaaattcagggaaatagggttagacttcaggaagtaagtacttttcaagtacaatctaatattttcatatatgagttaatttcttatcaaactgtaaccaatttttgatgttggaagtctacagtctaaaccagatgacagttaaggctttgtagtttgtctttatcaaagtccctactgtggccactttatcactgtctttatcaaagtcctcacagtagggactttgataaactacaaacacctagctgtacacctggcttaaagtgtagatttacaacatcaaaattggctaaagagcctcatgtggtctggccgctactacctcttgccttttctgtcttcccctttttttgccttcacacaccttggtctccttggccttccttagacccaccaggcatgccaccacctcagggcctttgcacgtgaggttacccctccctggattgcacagtggctgaacatcagtgaggccttctttgatcactgacactccccacagcccctgtactttctactgcttttgccctgctttatcaatagaatgggtcaccatctgatactctgtttgtatatttatttatttgtttagtctgtctccttccattaaaatggaagtactatgagggcagggactctgtctctgttgttccctgatgtatcaccaggacctaaaacagttcctggcatgtaatagacagttaacataaatgtgaatgaatgaatcattgaattttttccacttagaaaggactttttagatcgttaaccaaccttatttatagattgggaaactgaggcacagaaaagttatatggctaattcaaaataaaaccatcatttaagctttttttttttaaatcttgacatatatatagcacattctggtcagttatccaggatgagaaaagactgagtgaaaatagaccactaacttaaaatttgagcaagaagagacaagctgctgtgagatgggaaagctttctgatatagaggcagagttttgttcctttctgtagcatatggtgcaccttgcacatacttagtgctcaagaaaaacatgttgacgtaatgtggttatattgttaaatccattctttctgcaccactcttttccccccagtttctctccaaaaaatagataattgctcatatgacttctccttcaaagttcttctagttacaagtatcatatttaataggtttttgttttatgaacagctaaaagaattgaagagatgacctggtttcttggaaaattcagagatatttaatgcagtttcccagatgcatccccatcaaataaaacaaagaattaatgtttctagctctcttatgaaagaacccagttgacaagccttggtgatattgctggccatgatgattctgacctcaatgttgtttatgttcacatagacatccttggaattttacttttgacaaaaatattgtttataagtagcatgatgtttagatacacaaaagttagtttgggagtagggccaattaatttctctttaaacagaaatgaaatatagctaacctttttaatgagctgcagtgaacctcagagatgcagtgatagtactttgactttagagttggaagccatggcagttcaagacaagtatatttcagaaggtgtaggaagagaggaaaacagaagggcaaaccacataaaatacaggagaaatctttttctcttgtttgcatagactttttaaatccactcttaggtgtctttagatagcccaaaaaaaggattgggggatgtgctgccagtactttagaccatagagagatgattctcagttgatcatctgaaggctctttcaagctctacaagctcccctggaaactgatatgtacccccaaaacaaacaaacaaaaaacaaattctcatcctgtccagcccactactgatagttctgctgcctgggtttattcctctcctgtgctcctcctcctgctgtgtggaaatcctgtgattgcttgtagggtccattaatactatgcctctgtctgtatcataaggtaattaattataatatttcactatcataggaaaattaaactttgataacacaagtagcaaattcatagatttatatattccaaagatgagatggagaccctaaaaggtgaatcttattttttctgatccttggcatttagcttaaagtaagtcgactgttccaaacatctctacaaatctagctatgagagataaacatcatcacatggcactcctcttgaatgctactgttgaatcactccctgtcagctgggtgggtgtatgggctgacgtggttttctagcaagagtgatggtttagcatccatccatatgctatgtgcagtctccctcacaaaacctgtttacaaggattgcacccagggttcggaatttctttttttttttcttttttctttttctttctttctttgtttttttttgtttgtttgttttgttttgttttttgagacagagtcttgctctgttacccagactggaatgcagtggcacaatcacagctcactgtagcctcaatcttccaggctccagcgatcctcccacctcagcctctcgagtagctgggactacaggtgtgggacaccatgactggctaattttttcacttttttgtagagacatggtctcgctatgttgcccaggctggtctcaaactcctgggctcaagcagtccacccacgttggcctcccaaattgctgggattacaggcatgagccactgcatcaacccaggttgatatttctaaatgctgaaagaaaatagctgccaacctaatatttaaattttaatgtagagctactcataagcaaagtgtactggcccaaataggattttgtccatgatttaagataatcatcccctttccttgctataattcactaggctcacagtgcacccaagcatggggtcaaattgtcgacagattttagggctgtctgtcattcacgtaaagggaaatgttgtagaccatatctcaagaccaagtagaggccaaaggcagtttcagtctctccagagttacagagctgaggcatccacattaatagctcagttaagtccccttggagatgaaaacatttgatcagcagaggtcatcttagtgttactcagtttgacctgtctggcagacaggcagtttacaaaagaagaagtttagatgcctaacagacagatggaaagttactcaatttaactagctattaaagaagtaccaagattggctttttaatgtctcaacttggcaaaaggtaaatatgaattctattgcctggtttgagtacctccactcactgcctcagagaagggtcgtaaaattggtacagccttttccaggcatcctggtgatatgcaaatcctttcactcggctcttttctaggaactgaaagctagaaatttatttgaaagaaatgatttaaggacctactaacgatgtgagtatacaaggcatcattgtttgaatgctagtacttggaaacaacctaagtattttaataatagggaaattgttatatatctgaaggatagatttttatggtatagtttaaagtgctgtaaaatatcacacgattgtcctattaagatatttgaggtttattgttgagtgaaaaaaagcaattagcaaaacaatgtgaggtctagtgatttttttttttttgaaaaattcaaatgcgtttaaaagtcatggtaaatgaaactgtaaatcatggtattacaaaggattttattttgttctttttgctcacctgcattttctgttgttgctacagtgagcatctatttcttttatttttttctttttctgtttttttttttttttttttttttttgcgatggagtctcgctgtgtcacccaggctggagtgcaatggcacgatcttggttcactgcaccctccgcctgctgggttcaaataattctccttcctcagcctcctgagtagctgggactccaggtgtgtgccaccatgcccggctaatttttgtacttttagtagagatagggtttcaccaccttggccaggctggtctcaaactcctgacctgaggtgatccgcccatctcgacctcctaaagtgctgggattacaggcgtgagccactgcgcctggctgtatctattccttagtgtaatattttttaaagttaccaccacccaagaagatgtggttcagtaacaaatttggtatcctgctgagattggaaagggagctggggatggggtgggaagggagggccccccttggattagtgtgtttgacttgaatgaggtgtggcactgttcatctaaggctaaatttgagccattcagggattctcttcacagctctttctctctgttggtgaatatcaaaggacatattgaggggagcaaagtggactttatctggagttatagtcacaaatttaaatacatcttcaccagtcattattaaagaaagatctgcatttgtagttccaggaactttacggaccattctatctttctttcaaagggtattgctgaagatgtcaagttctcattttatagagatgctaatgtaggtatttatgtacaaagtttaaatgaccgctccagtgttttaagaagtaagtagtaaatgaatgcatgcttatcaaaaatagaatttgaataatacaggagtatgaaacatagaaagctaaagtctcccctttatacaatgtgttattctatttgtaatccatgttaactttatgtctttcttttttgtgcatttgcatatgcaatggtgtgtgtgtatgaatgaatatacactaatggtcttgaagtttttttttttttcacttaaatcagatcctagtatatacatatatatattattttgcaactttaaaattctcatatcatttaaygtgagcctttactaacattttgtatcttgaatctgagtaagggattgtatacgcaatattatatcaggaaaattgatttgcccttactgtggcttttggaaaaaagtggcacccagggcagatcatcagaaacctaaatttaagttgtttttccaaagtttagctgtcagttctctggaattctgaaacacatggaagttttagtaagtgattatagaactaacatcacagaagcaccaaaagactgtgatacacctaggtagtacttttttcaactctacctgtgaaagattttaagggttttttttttccccctgagggaaatttgcatttcactggagggcaaatcagctgtatttttttttttttctggttctcccactaatgagtcctgtgaccctaggcagtcagttgcttttcagggcctctctgtcttcctctggggaatgctacatgattgctaaggttctttactaaaaactcaacattctatgtctcattacctccttagcacctaaggtcaaggtgtccctagggaatggtgacaggttggtgccatgccttagtgccatgctatgtgtgcacaaaaggtgctactccaaggcacctgcaagtgtcctcaattgagccaaaggtcagttggtagcaagactgtggttggggaaaaaccctagctcttcactcctcccacctttttactgggagcatggctcatttgttaaatgtcttaccctagttctgcctgcctttgcataatatttgttattttttagtgacctactttaaaaatctggtgttcagactgtccatgcccacccccgttcttgcatgcagagtgtacctgtgctaatcataaccctgtacaagtcacccagctagtatttcaggatgggttagctttgaaagacactgtttctctaccaaataattatcttgactttcagaatgtgaactacatgtaatgaagggtttcagatacagtagctccgtttttattccttttgtttaagaactgttcatctgtcttccttgattcagtggccagggacaagtgttcagctgtcttcatcattctgacaagcgtcccggagggacaagttctgaataattgctcccaccttgtaccttaaaagataccatttcccattccttccttcttttttttttcttttttcttctcctcttttctcttcttgccaccatgtagtatcatctcattctatagaacaaagaaagcagcaaccccaaatagtgtgatatatgctaactcttccctctttcaaaaaagaaaaacaccatatatatttagatactctgccatctccaaaatgtccacattcattgtcttcgtttgttcattcctatcttttattgttgaatgaagatcagataaaacagaaaagagccaagaacaaagtagcaggaggagagagtgggagataagaaaggaattgaaacagtgggacctgtgctttatgtggatgtgggacatagggagggcttcctggccaatggtggggttcctagatgaaaccccagatcttggaggtatttttagagcctgaaggaccagtgataatactcaaggattagggatgggatgagtgtctggccagggaaaggcaggcttaggaggtatgatgcctggattcttctctatatctggacccattacccagccaaagatctttcttctcacacctctttgaaacatgattgtttttggctttctcttggagttactaaaccaggagatttgagacaagaatgatagtatgggtggaaccttgaagtggctccaaattccggagtcctctaggcttatatggagggcctgttttccaaacaaagctagtctttggttgctgaaatgcagctgctattactttctactgacctgtggctcagcacaaagtggcaggagacaggtgacagtgcctggctcagacctggtcttggggccccctggaaagaagtaaaggcaactccagcattcaaagttgagtctcttgtgagaggatttcccatgactttcccagctttaggggctagtgggtgacctccaacagcagcatcgtcagaacagggtggctgcacctagagaggtggtgttgggtggcagaaagagccagggtttgaaacctagctctgcctcttactggatgtatgccgttacgcaaggtttttcatccctctgagctgcggtatgcttatctgtacaatggaaataatgatagatttcatttacggagatgttgcyaggtaaagaagatggtgtaaagcacttggcatgtgctggtataactaactggttcttctcttcccttctgcagatagaatttacttccttcatatagtgaaactagacagttatctagcttccaaggaaaaagggaggcaaatggtagtgcactttaaaacaagccattttctccaagagccaccatattggtcactatatccatcccaaaaataccaactgactttgtagggtggtgggagtagcaggaatcatgtgaggcttcttgtgttatgccccagacatttgtagctacagggaagtaaattgacacatttggtccccactgcataatggcagataataagtacaagttaacaactggtttaatccaaaaattttgggagacttggggcatctggctcctttaggattcgacacagagataaggatgattcagacacttaaggccattgaaagaggtgaatgacccatcttgctcagtcccgtgagcgtttcccaccacttcccctgcctgcagagactctggcctctgttgagatagtcttctgtttttccaggcaggcaaaacagcagttttattgttgcagttgctactgtttgagggtgaaaaaggtaagtctggggagtatagcatgggtgacaaatgaaagggagagtagcactgttgcctttttaaatatattcagaatttcagccagtggaattattagtttcattttctgagcccacagatttgtaaacttctccttctgcagataagctagcaggtttcttatttatagggctttcccctctcctgattggctgctcattgagttagaattagtcacaaatctcttgaatttgtgtggcactttatcctatatgcactctcacctcaaaaactaaagccaccatcttccctccaaaagcagtcctaatagccttcaattctccatgcctggagttaaaccttatttcttctccccatagatttccccccattcacccagcagccattttctctaaattttgcctcttcagcttttaatccctccgccccttttttccatttcagtttctgccatgcacttgcccgcctggttacctgccacctctggtcgaatagggcccacaggtgtgtttggttttgccatcatgccacagatccacacagtttagaaaaaattagttgccaacttttataagccaagaattcatataaaaatctagattaccagtctcacttggaaaattagatgatctctcaacactgggcaagcattccttcatgccctctcggctggagccaggtggcctctgcccccttagatgggcacagatcacccaggctctttagtccctgtacagcctgcctcacatacacaggtctcttcctgagccctggaggcattttgattgtgactcccattttagaatgtgccctccctttttccatatcttctgtgctgcctctctgcttcctgaattaagttttaagtgcctcacctggtggcactccacagtgcccaccaatgattctcaagctgaacgtgtgtcagaatcacctagaagcttgaacaggttcaatgggtggggaggggatactcaggaatctatatttttaacaagaaagaaccctggataattctaatgcagatggcctagggtatatacctttataaacacagttacggtgtattccagtagcctttgctgcccattctttagtttcagtttcagaactcccagagaaggaagttgattgggccagattgggtcagacacctttcctctctcccaacaaatggcagctgctgcatacagcatgtragactaggtgggagaagtakttcccaggaaagaggcgctgggcaaacagcctggctgtctcctcttcagtgtcttgcgcccgttwcyggtacctgtggcgtgtcctgtygcctcctgmactagcaatccaggaagacacaggctgcttctcaatcaactgcttctccccaaaactacctcgtacctaccagactttggacagaggagttgtgcaaatgtctatttcttttaaatttttaactattttttttaaagttcagtgtgtacatagttaaaaatgcaaacaatactaaaagaaacatagtaaaaactaagccttcctcccagtcctgatttctaggtcccagacctcttaaaaaaagaatttaaatgttctcttttcttttcaggaacacgtggccatcagtaatcatgagcaacccattcgcacaccttgctgagccattggatcctgtacaaccaggaaagaaattcttcaatttgaataaattggaggattcaagatatggtaggtacatggctgtgatagcaattggaatctcattkgcacaatgattaggctatgtaattaattacacttgaggagagtttgaagagggagtagcagagaatgggtgaatgttcttggattaagtgcacaagcactcacatgcctttcctacattagtcatttttaagtaggtgataatgattacatacatttgacatttatataacactttatagagtatacatttgtatcgtatcatttaatctgaataacaaccctatggggtcatgtttataaaatataagaggtcctgaggaagctaaggcccaagagtcaatgacacatgctcagatcacaagtatgtgggttgtagacaagcaggacaagaacacagtcttttttattccaaattccgtcctttttctgcctttgcactgtcttttccagataaatttccagatagtattgcttagtaattttcacatatcaaaatggaatttttataaataaacaaaatcatttttcttatgaattaatattgttttattttaggaactccagttaccactggccatgctgcatagtgtttagggttttgtttcctttgaaagatgtacgtgcatatactttggtcttaattacaataattgtaaaggggttattttctcatttcttgagcatttgtttcataaggactattactctgtgtgtatatatacatgtataaatatatgttacttgtcaacatttaacataggctgcgtgtgttggctcatgcctgtaatccctgcacttcgggaggccaaagcaggcaattgattgagtccaggagtttaagactagcctgggcaacatagcaaaaccctgtctctacaaaaaatagaaaaaaattagctgggtgtggtgatgcttacctatagtccctggtatttaggaggctgaggtgggagaatcacttgagccagggagtttaaggctgcaatgaactgtgatcacaccactacactccagtctgggtaacagagtgagaccctgtctcgaaaacaaacaaaacacataatacaataaaaatctagactgatggtgagatgtgatgacttaagggaaactgtctgttgttggaatccaggacaagacaaccatttaataccaaagaataatattttattttggccttgtgtgtagtgttttctaccactgaatatctctttcttttttgaaacagagtcttgctctgtcgccaggctggagtgcagtggcatggatcttggctcactgcaacctctgcctcctaggttcaagcaattctcttgcctcagcctccccagtagctgggactacaggcacacgccacaatgcccagctaagttttttatttttagtagagatggagtttcaccatgttggtcaggatggtctcgatctcttgacctcgtgatccgcccgcctcagcctcccaaagtgctgggattacaggcatgagccactgtgcccagccctgaatatctcttaaacccattaaatatccatgtattttaaactgttggtcactttaccctctttccttgtggaagaatagtctgatgcctcatatcaactttatatagagattggccttaaagagcgctcttaagttgtctcacaggttttgtttattttgtcatccttaactcttagggcgcttaccattttcgatcagagttcttctggaagcagccattcggaattgtgatgagtttttggtgaagaaacaggatattgaaaatattctacattggaatgtcacgcagcacaagaacatagaagtgccatttaagcctgctcgtgtcatcctgcaggactttacgtgagcctaatgtcacttcactctcctttgcctccctcrttagcctttcaagaaagttttcttttaaacaaatgaaaacactctgcmatgactatatactttattaatttatgactatataatattatatacccatatccagacacttttgaaagctaagggtgtcattgcccccagcagcaagaggaaaccaggattgtgtccagcaaactgaaacacgccactttttctaataggaagggtcattatccttgctcttaaagatcctagtcctgagtatcttagggaaaggtcaaagaaatagcatggaatagagccatcttggaatcttttctttcccacattgtattgcccaggaaaccaggtgtgtcaaacacttgtacttgaaacactgatgtgctgtctgcagaggggagatgatgtagctcacatcacaagtcttgaccataactgttaagcctcagttctcatcttgctatttttagatatccttgctccccattgcagcatctttgttgagatactatatttccatttttaattgatgttattttattccttctagagacccagtttcatttttctagaggaagatcaccaaaatgttatacttttaagcgaaaaagagagattcatttaacatgaatttgattcacagccaacttttctgaattatatccattccttgaaatctggtcaaaactgaaaaggtgtgatctgaaagtcttctccaggtctttgtcaagccaccatgtgaatgggaagcactcacagcagtaagagttccagagttgttaagtgccagctttcccatcattgctgtatttagaacatagccgttattaaatttaatacggtgataacattgtacatagagataccacccagtcatggtacttactacctatgtgatttctgcctgaggaaatacgcttagaaactttcacttttctaagtctcacccattgttagctcctctgatgaggtagggccttgtcaatattatcaatggaggcaaaagctgaaaaatccagttacacacatttaaggcttattttctgcattattstctttcttctcttaggggtgtgcccgctgtggttgactttgctgcaatgcgtgatgctgtgaaaaagttaggaggagatccagagaaaataaaccctgtctgccctgctgatcttgtaatagatcattccatccaggttgatttcaacagaaggtgagagattaaaacgaatacctgagtgttctgctttgtgcaaaatctttgaacacgaatctttttaaaatgtgtatatgtagttaaagaagaaaatctttcaaagatatcttctgaaaaacttaaacttcatatacatttcgcagtaaagatgttttagggrgaagagtgggtggatttttcttttaatctttttttatttgtttttacttcttgggtgggagcagcctgcatttgaatctgacttgaagtctaggtgaaaacacacacacatgaagttctgccatgagagcttgtcaacacaagtatatgtcagtgcaagtatatgtttgagctttttcatccactggaagcttactcctttttttgatcccaagtaactgttgcatawctagcgatctctgcctcttcacgtgggtttccataatgcctatccctttctttccctgtgtttcttcttttgtttgggacatcctctcctctgttcctgccaaatcttacctgtccttcaaggccagcttaaatcttattctgttaggaatcctttactttccagcctacgaagctccctgttcttcagtttgccagatgatttagtgtcctgagtgggcctgtagcccttgaagggaagttgtcacttgagttgacttggtaagtagactctcagctccctgaatgcaagagctgagcagataaataggcatttaatatcctaaattgagtgaccttgaaattattcttcgattaagtgagaatcttggtaagcctgaatatagacacctaatggtctataacacctttaggtggggaaaaactaaacarctctgaggataggttttttgttgctgtttttgtttttttaaatccatccccacatccttagcatccaaaggtgtgcatattaaaatgtcttcgttggccmcgtgcagtggctcatgcctgtaatcccagcactttggaaggctgaggcaggaggatcgcttgagcccaggagtttgataccagcctgggcaacacaggaagaccatatctctacaaataactttttaaaaattagccatgtgtggtggtgtgtgcctrtggtcccagctacttaggaggctgaggcaggaggatcacctgagcccagaaggttaggccatgcataccagttgggtgacagagcgagaccttgtctttaaaaaaaaaaaaatcttaataaaacgtgttacaaagaagagaactgaacatgtgaatatgcagttgtgaactagcaacttaggcctgacctcttaacaaactttgaaagtgaatacttcttaatcaaaatatgtgtaccatttgtaatcctagcccattgaagagatgactaagttttgtgaggttaggagccaagtagtaatggtcaattttcctgactcagtttattttaatgagcttttatccctaaatctcactctctaaaagcctttggtttacgttggaagtattgggagtgagtctttgggttaaaatggcatcaggatattaaacattgttataaagccccagtcttttgtaagatacacaaaaaggcatagaaaatagtagaatctaagagaagcacttagtgatttgataaggcctataagagtagagtacctgatggccgggcgtggtggctcacgcctgtaatcccagcactttgggaggctgaggtgggcggatcacaaggtcaggagatcaagaccatcctggcaaacatgttgaaaccccatctctactaaaaatacaaaaaaaaatagctgggtgtggtggtgggcacctgtagtcccagctacttgggaggctaaggcaggagaatggcgtgaactggggaggcagagcttgccatgagcagagatagtgccactgcactccagcctgggcgacagagcaagactccgtctcaaaaaaaaaagagtacctgatgaagttaaacttgaaaaaaaaagaatctagtcatctttgccctttggctcaaaatggtaatcaacagatgggaatgaagtcagaagaaactctaccatttgtccttttctccaaaaggcagaatttgtaccagccaaaaccgtgaagatttcaatgtagagatgggtgtaaaaaaaaatcagctattgctgtataacagtcccagaatctcaacagcagtcaacagtaagaatttatttcttacacatcttctagttgtttgggaggtcagccgacctaggtgagcacagtcrggaagctctgctttgcactgcagtagccaggttgggagcttacactgaaccatacatctgcagggcagccgggacaactctgttccatgtgtgtttcttttggggtccaagctaaaggagaaagcagctgtcttgtgaccacagagactcaagggggcaagtgaaaacacacagtatctctaaggcctagctaaggaccagcacagcatcacttctgttcacggtgccattgatcaaagcaaatcacatggttgagcccaaagctggaatggggaaatacagtccacccgtcttcggtggaagtaacttcaagattacaccacaagggttttgatacagggagggcaatcaggtatttttaagaggctattatcttaacctagaagtatgactacctaaagttgtcaaaacaactatcagtgggagaaataacttttccatatacagtgctggaaattgattagtggagggagcagttcttatgaatgtttaaaagttttagaaggaaatgtatgcgtgtcagatgtcttgatgagactaaatttagaagcaacgaatgaaacacggaaaaaaggtatagatttagttactgcaaagttaagagaaaataacttgaaaaatatggcaaagtgttaatatacttaatatatggagtgtctataatccatttagaaaaataataggtccctgaagataaatgggcaaaggaaagtggacatttcataataaaaggaaatgcaaatggtagtaaacagtatataaaggtttttcaatctcacaaggaataaaaaagtaaatatttgagatgtcattttcttatcaatatagttgagattagaaaatattaattatgaaggtgttataagggagacacttttatacactgctgatagcactataaattagaaatgaggattaaagcaatatgtgttaagaccttagaaatttctatatcctttgtcctggaattcctacttccaagcataccctttatatcatttatttatttatttatttattttttgagacaggttctcactctgttccctagaccggggtggcgtgatcacagtccactgcagccttgacctcctgggcttaagcaatcctcccacctcagccttccgagtagctgtgatcacaggcatgcaccattacatctagctaatctggatagctgacttcagaaaaagcttaatggccaataatgtttattaaagtattatttataaatgaagcctagaaacattctaaatgtccaacaaaaaatgctttattaaattacggtatacccctgaagtgaatcattaggtaacctttagagtttaatttatgaagtctttaataacacttggaacatgatcacattgtagctcaacgagcgagatgctacattgcatatgtagagtgacataagctamatggaaaatgatgcaggaattaaaagattggaaagggtgccaagttgctaagcagttatctcagggattgcaactgtcttcattttcctaataagaagctattatttttataattaagtcacttaagaatatgaaaccactcaacgggaaacaaaaacacctttatttgcttccttggggatgtaactgagttcctggcagcctcaaaagaaatttagaaaatgatctttctccagttaatattgctaacatccaaaccagataaattcaggataaagagaaatctactttgtcccctgaattgatggtacttggaacagaccatgtactygccaactcttccctttcctttggactctgaacctgtcctaaggcaatatgtcttccccaaccttccttttttcctaaatcacgtgaactcagtttaatgttttggtttcaaatggaagagtttaaaatatatgcgtaaaatgttatcctgtttgagataggataaagacccacttcagaagttaggaaagtagccataaattcatgcccagtttcatctttcttggagtctttcattaatgttgatgggtttaccttcattttgcttgcctagaaggtgaaagtacaggtagagacagaattgtaatatagttttcatgtctaaactctattgactcaaaattcaaagagctcatggctgttaatgcatcttgaacttgggtcatcaccaagttcactgtaattttttttttttagaccttgactctaatcaattgtggtttcagttttttatagacctttttcatttacaccatgtactgaaaacatgaaaaacagcaaaatccaagggtgaactttgacctagattgataaccaaatctagcaaacccacatgtatatataaaatcagagtgaacactagccggggcggtggctcgcccctgtaatcttagcactttgggaggccaaggcaggtggatcacgaggtcaggagatcaagaccatcctggccarcatggtaaaaccatgtctctactaaaatacaaaaaattagccgggcatggtggtgcatgcctgtrgtcccagctactcaggcggctgagacaggggaatcgcttgaatctgcaaggtggaggttgcagtgagctgagattgtgccactgcactccagcctggcaacagaatgagactctatctcaaaaaaaaaaaaaaaaaaaatcttttagaagtgtttttattggtggtattttgtttttatttcttgagttgtggttttgcaatttaacctcatgatctctctcctcatttttgtaaggaattaaatgtgatgtctcaactctgtgaaactgtgtgctgtgggctaatttccagctctttctggaaatgagtgagaaaaactgggtaaggggtggtagagtggtaaatgtctcagttaaatgtttgtaagctctttgcctagtttgaataatactaattagcttcacaccatctttagaagttgaagttctaatacattattgtgatattttacaaagttacctcaccttttttttttgttcctccaacaagaatttcataacagtgactgggcacggtggctcatgcctgtaatcccagcactttgggaggctgaggcagggggatcatgaggtcaggagatcaagaccatcctggctaacacggtgaaaccccatctctactaaaaatacaaaaaattaactgggtgtggtggcaggcgcctgtagtcccagctacttgggaggctgagtgaggcccgggaatggcgtgaacccaggaggcggagcttgcagtgagccgagattgcgccactgcactccagcctgggcgacagagtgagactccgtctcaaaaaaaaagaatttcataacatttctgaccagatttcattaatgtgaaaactatctccatgttaatactgtccgtgaatttctggagctccattaaatgtaattctcagaaactgaactacattcaattctgaattcaaatgaactaagaaatttcctctttagtccgtgaggccattcacatttagagaccttattaaaagctcactagattagactaatttagggaagttctgagtggtagaaaattctgaatgctaggtctattcattccagtaactagaactaggctaattgagccaagctccatataatagatgttttgttttcctgagtaaatagggttttacctggaattactgtatcatgaaacagtctaagcatttctggcttctgcacgtcctatgaacatgtcacttccatcaaactgatacccccagcattttctggggtaaacattcctccgtcaatcatcagtcatgcttctgctgtgagaagctctgccatcctcctggtgctggagggtggaagatcagggacaatgactaggagtccataagtgctcacagtatagcaaaatagatggggaggagaggcaggggccacatgtggttataatcttacctgtagtggtagaaatcaaggtcagagatgctttccttttttaaaaaaattaaatccatttagcagatctattatgtgccagtatttattccagaaacagattatagtttagaaggggagagaaattagtgaacacacagctttcatgcagttgataagtgtagtcaccacagagaaggggcaaatcatcctgacctggggagtctgtgggtttttcaaggagcgtcacctgatctggatcctgagcctgtttaccaaggagagaagagctgaaaaagaccttccactcagagcaaatagagcatgcaaaggcacgaggaaagtgggggtgggaagagcatgctggctacagtgtagctgaagctgagagcttggactggaggctaggagagggcttataaaggatggctgaggtcaggttgaaggacttaggtttttaagacaaggaatttttactttataagaaaatgggaagccattggtagattcagactggtgcatgatgatttatattttagaaatgattgaggtgaccataccaaaggtagattgaatggcctcacagggcagctggttgggaggctatttctggaataaatatcttgatagctataggtactaagtggtgggaaaagagctcattagatatggacagacagggaagaggaacagatttaggaaagaaagcccagcatcagggtttgacccattgagttgatggtgcctgaagtattcttggtgcgcatgcccgaaacacactggaaacatagatctggacgtagagacaggtgggaactggagtgatggagccctcagcatactattaagaaggtcgagatgagtaccttgaggagcagctgtgtctcgtccagagggtccacagagtctgctgatgccggtgtcggtgcaggtgtcctgccttgttctgctatcccggggtccctcctttctctccctcttttgctcttctcgaacatgtacacacacaaatagacactcattcactcaggcagggatcagcagactttttctagaaagggccaatagcaaatactttaggctttgctggccacatgctgtctctgtcacatattcttccccccaacaccccagcctttaaaaatgtaaaaatcatccttcatttgagggccaagcatatatgggcattgggtcacatttggcccatgggctgggttgtagaccccagcccatgttaggcagtctcaggaattgatcctacctattaaagcaaccaacacttgtcttggagaatattcatatcaagagaaaaaaaatctgtgtggtaaccaaatatgttttctttttttttttttttgagatggcgtcttgctttgtygcccaagttggagtgcagtggcgcgatcttggctcactgcaacctccacctcccaggttcaagtgattctcctgcctcagcctctcgagtagctgggattacaggcgcctgccaccatgcccggctaatttttatatttttagcagagatggggtttcaccatgttggccagtctggtcttgaactcctgacctcgtgatctgcccgcctcagcctcccaaagtgctgggattacaggtgcgagctactgtgcccggctccagatgtgttttctatgaggtaaataacacatgcttccggtcccttttttcccaaggagtgtctgcccatcttgctcgggctgactcacygtcatccttcagaccacattgataccatgtccttctggaaagcattccaatccccccaacccccacccccaggtgggttcatggcccattccaagtgctcccgtaccaggcagtgatgattgcattcttttgccattgccctttcaccagactcagagtgccagtgggcagtgagcacacagcttttgcaccattgcattttcagcatgtagcatgtggcaggctctgggggaggggaggatcagagtgagtgagaagcagagtatcatggtcaaggtagaaacccccagggccagtcagacctaggctcagataacagcactgtgttatcgtctaactttggacaaatttaacctttctgtgcctcagctgctgcttctggatattgaggatgacagtagtatttacatgaggggttgtgatgataagttcacatgtgtaaagctctgagcgcccacaacgtaatgttgtcctttagctcttgctgttactgtggtggtgttaactaccactgccaccattactgccacagtcgctgttaactatgacgggaagtccatgtggtatagggattaaaggatagtgtcaactcgggagtcagactgcctgggtttcaatcccagttccaccactgactagtgtctgtggtcctgagcaagtttcttaacctctctgtgtctcagtttccccacttgaaaaatgtggctattagttgcacctaactcaaagggatattatggagactagatgagaaaattaacataaagcatttagaatagttgctggttcctagtagtgtcaaaaagtgttaactactgggtactaggaagtagttatccagtacttcatttattaatgaagtctgactttggtcttagctattaattttactagcctttcctgtgttcactcaatcctatgatacatgctttatgagcacattctgtgtgctgaatctgcgatcttgtgactatgacttattctaccttgactcaaaacaatgcagtttgatttttaaaatcctagaaaatcttggtgccctgtgttgtcctgatggactgaatgacgttgagtaaatcttagcgtataatctgtggttcacagatgttatcaagtgacaccatcttcctcataaacctgggtcctacacacaggagattgtgattctataaggtactgatcctctaagcattgctagttttctgtctcccaacataaagagatgaaaataccagcccagacacattccaggtcagagagatgttataatgaggtcatggatgaggagtatagaaacaagagttctttaaatgtccaggctgctgttgtcatatgaatgtcttgagtctgttcctaagagtcagactttatgattagattagttttaacttcaattcagttcatgttttytgcctaccatagttaaaggcattgtaggaatcacttgaaccaaacaataattactctctttactttcactagttacctctcctattctgcattgtaaatagtcatgaatgaaattcatattatcactcagcaagcaaggagatgcaattccattttgtttcttcatcaccaataaatttgaccactaatatgttaagtctcaaattgtatacatttaatttttctctctgacagggcagacagtttacagaagaatcaagacctggaatttgaaagaaatagagagcgatttgaatttttaaaggtatgggcagggtctggttccattgtttggttttctttgtakgcagggtacgagggagagatgccaaggagatgggctgagyagaagtacttcacgcgttcatagtgttctttccatttgtcaatcccagtggggttcccaggcttttcacaacatgcggattattccccctggctcaggaatcatccaccaggtgaatttggaatatttggcaagagtggtatttgatcaggatggatattattacccagacagcctcgtgggcacagactcgcacactaccatgattgatggcttgggcattcttggttggggtgagtgttcttccatatatgctgttttggggcatgcactttaattcactgtgattctattacatctcagtaacatgaatttacatgaccacaagtttccgagaggtatgtttgtcagttttgtcactgctgtttttccagtgcctagagaatcactttgcacctagcaggcactcaataattatgcttggaagaatgaacagaagcaaggggttaggtacatttagcatacacaaaaatcacctggggtgttaaaaatagagactcccaaagcttactcttctttgcatgtggcatcaaggggattttgatacaggtgtttgggggaccatgctttgagaaacatttgttaaaaaattctataaaggaaaatggagaaaaaataactgctctttatagaaacatgactctgcaccaattaaacgttgtaactgggtttattacctgttaatgtcactaaatttatacctgagagatagagtaaggggtaatgaaggcattcttccggtcatgccgttcattgcaggtgtcggtggtattgaagcagaagctgtcatgctgggtcagccaatcagtatggtgcttcctcaggtgattggctacaggctgatggggaagccccaccctctggtaacatccactgacatcgtgctcaccattaccaaggtaacaatgtgcatcctcttctgtggtcttggaaagccacaatgatagctttccaatggagggaatacataatrgaatcttgtttggtttccaagtgctctagcaatgcaaggaaacaaggttgatgattttaaaaggagatgaggtaagggaagtgttctatgttaagtttagatcattatgtttgttttcttctagtattgctgcatcgatctttttcttaaaggaaattttttaaactgaaatagttcaatgatacagaaattaagatggcattcatatgcccaccacctagatttaacagatgataccattttgtcatagttgcttcagagctctctgtgtttttaaagaaataatatgtaatatctgtggctaaagccacattccccatttctagaaataatcactatcctgaggttgtaagaatcattcccatgcatgtgtttatgctttcactacatgttttccacatggttcttccttttatgtaaatagcaaggtagttccatgaatagagttttactttttaaattctcttctctgtattataagttacattattgtaacatatatgtcaccaagctggaaagtattaggctttttctgtagctgttagaggagaccatctttttctgtgatttgcttgttttgtaaaaaggccatttcgttttggaagactcttgcaaaagcaatggtttttaatgatcacaaacataattttttttgcttttatagtttggaggctggggtcctttgcatggacatgctatcgttaaagtgcaaaacacatttctctctgatttaatttttgtgaaattttgaattggatttatttgaataccatagcttatcacaaatgtctgtgcactgttcttaagatgtggaatactacaggacttcctcacaaaatttggcagaattccatattaccaaaagagcccatctgtgtggttgtagctagaaactggctttatgcagagctaagtcagtcactgtggcctcactcctggctggtgccttgtgtggaaaagatatgggaatcttttggttacatttgacttatacttgtagcatgaattttgctcattacgcctttgaaaagttattttcttaactagtgcaagtagttatttaggttgaaagaatttaatatgtagcacttccagacgcttccaatgatctcattagagaaagagaatgtttctcatcttgaaatatttttcttaatatcatttgtattttgggcacactttgtctttctttttataaataaaaactatttgacatcatcttagatttatgggagagttagtataaagagtacagagaattcctgttatctttctcccagcttcccataatgttaacatcttaaataaccatggcacatttatcgaaactaagaagttaacattggtgtggtactcttaactacagactttaccagttttttcagtaatgtcccagaattctgctccagaatccaatccaggataccatgttgcatttagttggcattgttttttaagttttgaaagtgatcacaaatgtgttgggctgatttactatttgggtttactgacaagactagtttataagaagtgcaagatggtagttctgcattttgaatgtgggccatcagatctcaaacttttctgttgtttctgctgcttagcacctccgccaggttggggtagtgggcaaatttgtcgagttcttcgggcctggagtagcccagttgtccattgctgaccgagctacgattgctaacatgtgtccagagtacggagcaactgctgcctttttcccagttgatgaagttagtatcacgtacctggtgcaaacaggtaagtgaagggccctgaaagcatcgggctttttgtaaaagttccatgaaacaccaagaatctgagcactgccttctgcctctacccaacagaaggcactgggttacagttacacaattatttttttctccatggagtcaaaatgggtttttgggatttaaggagttaatatgagatagagatggtatggccaatagaaagagctcagagattacagaagcctggatatttatactggtcctctactactagttttttgacattaaacaagtgatcttagtaatggttactgctgcctatggggtacttgctgtgtaccaggtacctagtatgtatttgctgtcaacctctttacagatctgtagggtagattgattgactagttaattaacattagagaaaactgaggagcagagaagtgttcatacccaaggctaataaacagcagagtcagaatccaaccctgcaactgcctggccccatacaggaacagcactctgcaacacccctctcagggatgtctaaaaaatgaaatgagtccaggcatggtggctcactcctgtaatcccaccactttcagaggccaaggcaggcagatctgacctgaggtcaggagttcgagaccagcctggccaayatggcgaaactcccaggaggtggaggttatggtgggccgatctcgcaccactgcgctccagcctagccaacagagagactgtctcaaaaaaaagaaaaaagaaaagaaatgagagtgtgatgtgataatgagaaagaaaggggaggtggctgaagtaccccagaggtgcttgcacagatctctggatgaagtgaagggacagccatgggaagggtttcatgagaatcttacagactccaaataaatcttagtcttctgctgtagcctgaggaaattcctctagaaatagtaaagattgtcatgaaaaagtttatttaaaaaagtttttattaaatataaacacattgaaattgattaatacatctttgttctcccaaaggattttaagtgaaaaagataactaaaagaacagaataaataattgagggaatcaacctaaagaaagagagggatagtgtgctgggtagagggataaaagctgtgagatggatctagagggaaggttagttggttagttcccgtggtgctgcaggtggccattatacttcttggtaatccagtgccaaatttgtaacatctattaaattgaaacaaacatattgcttcagaatagtgtagccctttctcatagtaaaccctaagaaagatttctcctgttcatcttcatgaagagcatggcatgggttgtagtgaacagcgggctcaacaacaggtcaggacaaatacattagtgaagctcatacagctgtcttttatgaggtctgtgctgagagctaatgacgtttacagttcagctaaaacaaatagacaaacaaaagttctgatcagtggtaggatcagccaaaggatcaaaccttctgtttctaaccatcagagaaattgtggactgcatgtccgttgggcatacttcatgagtattatctcctaccccgggatcttgataaaagttaaatagcagagggttcaaggtcatattcctggtgatgcagcatcgtgagttaagactttgaacttttgggtcaagctcaggtttggattttggttctaccgtttactggctgtgttacatgagaaagttacttagtcttcttgagccgccatttccttatccataaatgagaataataattgtacttgtatcttaagactatgataaaggattagagattgaggtaatacatttaaaatgtttaggacacagtgcccagaaagtgctcagtagccagtggtttcaggtggggttgggatgcgttttaattttaacggtaatcatgtggaatgctgaatctttgtggccagttgaaggcaaatgcataggtgtgctttcacaattagctcaggtgtaagattctcctaattaaaggctataccccaaaagaggcgggttatctatagatagaaccagaatctttttcagaaaacagtcactttgataggaacagcacattcattaatggcccctaataaaaagcagcatcagtgggagagtcaaaccattagcctggaagcctaaaaattgacagagctgttggtgtgtgtgtaagtgcagcgtatgttgcgtacttacataattgctaatggaagtatcagtttataaacttcaaccaggaaatactaacctatgttacttgttactcyttaaaatgccttttaggtcgtgatgaagaaaaattaaagtatattaaaaaatatcttcaggctgtaggaatgtttcgagatttcaatgacccttctcaagacccagacttcacccaggtatgagagtgccttccactgtgcatgtatttcctcttcctcaaggctgcgattttagtggtggtttttcttgggggaatgcgctagtaggaaattagtcactgccaaggcattacaagagaacggagttttagaaggttgaaaaacsaaaaggataaggcaattgtaaacataacagaataatataacttcttacattcctactggcttaataattgtaggttaagtgtgcttccctatttgaactactgattcacacctcttaatgtggaagaccactgaaagactttgctaaaggaataagaatgatacaatggactttggggactcagggcaaagggtgggagggaggtgaaggataaaagattacaaatttgggtacagtgtacactgctcaggtgatggatgcaccaaaacctcagaaatcacggctaaagaacttattcatgtaaccaaacaccacctgttccccaaaaatctattgaaatataaagaaaaataaagagacttcactagtggaacaagagctgtttaaaggctaaaccatcattattacagacctagaaagaagtgaaggtacaaacatgtcagtaaactgaatccacgtttttctagacaacaaggtaaactagccctgcgacccatgtttggtttcttaatacattgaggaggggaaatgttcagttagactaaggcccgtttcctggtgttgataacttaacggctgcatccctccgaaatcaccttagaagtgtaatggtttatgtatgatttcaatagaaaacccaccttcggcctaacttagccatataaaacgcgatgagctgcctccaaggatgggcgagtggaggacactgagcatctgcagcacccaccctgttctttctgagaggtggcaaggctgcctgcctgtctcctgctacttaagtgcccatsatgatcttrggaaattaatcacttaagattaattaagaggattaagagaaacactggcttccttgttttggaatgtggtagtttatttgcttatttttatggttgtcatgttttaaattctctgacatgctttgggtttcctctttgtgggtataatgtaaattctataatttcttttctttggggtcaacaggttgtggaattagatttgaaaacagtagtgccttgctgtagtggacccaaaaggcctcaggacaaagttgctgtgtccgacatgaaaaaggactttgagagctgccttggagmcaaggtaggggcctgcgggaagaggttgaatcctctcaactctacctcttgcctggttactcagcgtccaggctttcatcccacttgacatgaatcttcctgtagcctgaagcttgagggtgtttattcttccttctgaagtccttaatgacttcctccattagtcacgagccaagcggcaagagccatcatagacacaactcaacccacctttttaagcatgtctgcttttcgcaggacgctcaccacactgtttactcacccgaggttttctagctgttgcacctttgtgcatgcccctccctgcctgaaagtctcttctccaactcatattactctgttctgtgaactccataagacttggttcagataccagctactctgcattgggttctcagaatctcatagcagaaagtcccctttcccttattggacacttcatggtgcttgggctgaaatacttcgatagcattccatattctttaacttacattgttggtactttatttgcatgtatgatttctgttgctagactgtacgtgtgagaataggatttgtgtctgaatcaccttgggagcccgcaaggtacctagcacagtatcttacatgcrgtagattttcaatgaacatttcccaaaagaatgattaagatgtatgatggattttatctgtgagacaccagtattatgccaaatattcagctgtactttgtttgcgttgttgatcatgattaattgagtctggtcaaaatagcgcctttttctaaatttccataaggttagaatccatagtcttaatcagtccatatccattaaactgtacaataatgtcattgagttcaatttagactaactttaaatttgtagttttagcatttacatttttgaggtgggaaggaagtaattgttactaatttcagtgcagagtaagactcagatatcatgactgctttttgtaaagatttcaaacgagtaatttttctgtagcatttcagagtttacttgcagagatacttakgcttttgttaagaattggcctttaaaattatagttaccaaagtattccttcttctcaagtgagaactgttgactatatgtatgtattttcctctagccagatacatgtatatcttatataaatatattcctatataatatacattttttcttcctttagcaaggatttaaaggattccaagttgctcctgaacatcataatgaccataagacctttatctaygataacactgarttcacccttgctcatggttctgtggtcattgctgccattactagctgcacaaacaccagtaatccgtctgtgatgttaggggcaggtaagtgcatttgactccatcctcatggtcatacatgtgtgtaggtggaaatagcccgagacagggcccagggccttggcggagttgtacatgtagttccctgaacctcgtcttttccagatacagatatttattggcccataaatatctacacaataaatagtatccaaagcaaagtttttaaaatcgaatgcacactgcataatagtctctcttgagaattaacacagaaaataagtagaggaaagcaaaggaagctggatttctgggaaagcctacattcttgtgtcagactttggaagaaaaataaagtgttaccacagactttgttctccgtgaaacccctgagcagcaggattgagttctgacgtgaatgctgggaggtgtttctcagtgagggcacagggcactggctgataaaacctggggccactggcctgtttcgcaattctggttgagttgttaatatttacatatgtggtttccctactataaggtctctttagtttccaagtttttagtcatccccaaagctcctcttatatccatccacagaccagacagtgtcagcagttcctttctatgaagcagacacgggcattaggaaagccttctttgcctgagtccgtgtattgccacctaagctttccttgtctggtctggagcaaaccagtcttctgtagacaagttaccagcttgtctgtggctttttgtcccctcatgtccccacccccactgctcatgtttttgctacttctgtgatacttcctaagacagagcacccagtgttccagtagcagtctctgtatctgccaaagtccagcagatcctccacttcaagatatatctgaacactcgatttttacttcttggctgaccgttccttgccagccagcacacagctgatatagtttcagaaagggctccttcaatgatgattttcatccaaataaaacataattagaaagatgattttccctctaaaaaaaaattaaaaactcattttgtaatatattcctaaatggttttacatttatctctttaaaaaaaaagtaagcaaatctctttcttcatttccttgcctagctttgagtttactgcatatatctaaatgaccgttggccagggagcctttagatttctgtttggcagcagaaacagcagatagcgccaacatgaagggagcgtggtcaggtggtggcaggaaatgcagactgaagaaaatcaggctcttttctgaagtgtgcctggcacctagagcaggcagcctcccacactgcatctgtgtttaccatttcacaggattgttagcaaagaaagctgtggatgctggcctgaacgtgatgccttacatcaaaactagcctgtctcctgggagtggcgtggtcacctactacctrcaagaaagcrgagtcatgccttatctgtctcagcttgggtgagggagagttttcttttgcaccattgcttttgttgaattgtatycctcatgtatcttgctgtgtcaccttgtaacagatgtgagattatctgatgatrtctaattgcatagtcgtttatcagttggtagttagacttaaacccttacattccatctaaagagrgccctcttgccctctagggcacctaccatgaatggagtttgcaggactggaagttgctttggttgagtcagtgaatgagtggagagtgaatgtgaaggcctaggacattaccacacactactgttgactttataaacactggacacttaggccacactaacttaataaaaaaaagtttctttcttcaataatgtaaaccgtagcttacttttattttacaaacttttaagtttattgaaactcttgactcttaaaacacttagcttaaaacaamcatattgtatagctgttccaaaatattttctttatatctttatttcataagttttttcctatttttgaagtttttatttttttactttttaaacttttttgttaaaaaccaagacaggctggacccagtagctcacacctgtaatatcagtgctttgggaggccagggcaagaggattgcttcaagccaggagtttgaaactagccagggcaacatagtgggacccctgtttctacaaaaaaaaaaaatgtaaaacaattagccaggcatggtggtgcatgcctgtagtcccagcttctcgggaggctgaggctgcaggatggcttgagcccaggagtttgaggttgcagtgagctatgatcacgccactgtactccagtttgggtgacagcaagaccctgtctcaaaaaaaaaaaaaaaaaaacctaagagataaacacacactttaggcctacaccgggtcaggattgtcagtattactgtcttctacctccacatctgtcccactggaaggtcttcaggggcaataacatccatggagctgtcatctcctgtgataataatgccttctggaatacttcctgaagaaccttcctgaggctgttctacacttaactggtttgcttttttttttaataaacaaaaagagtacactctaaaagaacaataaaaagtcagcatggctgggcgcggtggctcatgcctgtaatcccagcactttgggaggctgaggcaggcagatcacgagatcatgagatcgagaccatcctggctaacacggtgaaaccccgtctctactgaaaatacaaaaaaacaaaattagccgggcgtggtggcgggcacctgtaatcccagctacttggggggctgaggcaggagaatggcatgaacctgggaggtggagcttgcagtgagcagagatagcgccactgcactccagcctgggcaacagagcgagactccgtctcaaaaaaaaaaaagtcagcgtgagtttgtttataccagcatcatcataaacaagaaatgccttgcactgtgacatcacgatggctacaacatcactaggtgataggaatttttcagctatataccacatatacatttgggtatatgtggtctatcactaacagaaacattgtgcagtgcatgaatgtattcgttgccaaatacgctttctccaatttccatattattcctgacttatgacatatattttattcatgtgcctcataaaattcaaatctccttaggattatacaataatagtagttaatgaagatatggcatatatgatttcaacttttttaaattgttgctcattcaatttgattcctttttataagttaaaaatatgaatagtattcttatgttatatatcagaatgctctcaagaatgaaacttttagaaatagcactatactgaacttagttcatgcactgcaattcctttttgaacagtggtctctggaaactgtggccagcagaagggctcactgaaagttattctttttttgtgtgtgtgtgcttctctcttggtgtctaggtttgacgtggtgggctatggctgcatgacctgcattggcaacagtgggcctttacctgaacctgtggtagaagccatcacacaggtaattgcagaggtccctgcaggtcttcagagcagttgtttcttttcatgtaatgtgacaaaaatgctgatattttcaagaaggtccatggaagcaggggatgtggtttagagtatgatcttttgagtttagttaaaattactagctgggtaaccttgggcaagttaattaacctatctgtgcctgggttttcacaactgtatattggagatgataatagtatctattttatagagttgtgagaattaagatgatgataaacataagtcacttagtgcagtgtctggcactcaagtgctcagtactggctggttttcactacaaagggctctacagttgtttgttataggtattgggttagtgcaaaagtaactgtgatttttgccatttcagtgatgaagaccacaattacttttgcaccaacccaaataatttgaaaattggttcaaagtgagacaagtctccacacaaacgaatctaaactaaattgctttggcttgatttttatccccaaaatgctgaaccttgaaagatattatttggtttgctttgcattaattatagaatctacgtattctataattgtgcattgtgacttcctttaacgatcaactgttaggtctttcccacctgttcttgggccccaggcagcaataactagtatgttgccttctaactacctgatattttctcgtgagcagaaatcactaaacatgtctctgcttcctttgacccagagtatctcccatggggacaccccagtgtacccttctcccctctagtgggagagaaccaagtgaaagggcagcttaaaggactgtatccttgcgatgtggaaactcttgccaatggtctgagacaagaagcctagtcagtatcttttagtgacctgatttttctcttgccttactcagggagaccttgtagctgttggagtactatctggaaacaggaattttgaaggtcgagttcaccccaacacccgggccaactatttagcctctccccccttagtaatagcatatgcaattgctggaaccatcagaatcgactttgagaaagagccattgggtaagattttgtttgtgcagccataatttttttccagtgaattcagaaatattactagaagaaactgctttccttaataagaaatgaagcatagagcctccagggrtaagacaaagaagagaataatttctttattccccaatatacagctaagacttaactgcagtagttaaaacaagaatctactgagggtaaaggataacgaaaggaaaacaggtgccaaaaggaatagacatcttgctattctggtttcttctgtagttcctccctttctagctctcactttaatgataggcattgtttcaatatatactctgtagaaacatactgcagatatttcaacttctcagaattccaaagaaatgatacatcatttcctttccccagatcagcttgcttgctctgcctgcctcaatctattctaagccgaatagataatatgaaaacaatgcctctgaaatttacttttaggaaatcataactttagacgtacagttgatcctcgttatttgtgagttctatgtttgcagatttgcgtagtcactaaaatgtattttaacccccaaatcagtatttgtagtatgttcacggtcattcacagatcagcacaaaggggtgaaaactttatatcattcaacacacacgttctatgctgagatctgataaggcgtcactctgacttcttgtttcagctctcctgcgatatataaggatccttttcttggtctacgtartgccatgctttttgcatttttgtgctttttgtggtgattttgctgttcaaaatggtccttgagcatagtcctgaagtgcttctggtgttcttgagcacaagccgactgtgatgcgtactgtgtttagataggcttcgctggaagttcaatgtcagtgagtcaacaattgctattaaataaggtgaataataaacctcacatgaagcaaggttatgtattgatgggtgaccagaggcttgcaggaacctaaccctgtatttcctccagtggcagtgattccgtatccagtcattcagtgttcacacgggctttatagaacataactaccgaggagaacgaggcttgactctgtataatcatgaaaattgcrtattagaaagttttctcattaataaacattttttccccaggagtaaatgcaaagggacagcaggtatttctgaaagatatctggccgactagagacgagatccaggcagtggagcgtcagtatgtcatcccggggatgtttaaggaagtctatcagaaaatagaggtgaggtcccacactgccctccccgccccagaggatctaagggaaagctgctccctttgtgtcctgtctgcagacctcaaggctaacggragtataaactatataaagtaacatttatttcttcagatgactggggaggtggttctccgtcatttttctcctgtgactcgcatttttacaaaccycacctcccccagatgttcccagatttggacaagttggtgacagcctagagaagaaaggcctcctcaggttcagctctccaaaaccccacgcctttctcggacacccaggggtgtgtgtcagctgtggcgaggacccctggtggtcactatattgtgtcactaagtggagtccattggtcgaatgcacctctcagaatgcatttttgcacacttaaaaataaagaaattaaggccactcagtaggaagtgccaaactactgaaataaaactttccgtgcattttacaaataggaggaaatgtgtggggctcagcattatattctgagactcttggatattattcctttccccgccttctgcattcagctgacccaagggcttctgactgcggctgatggtttaaatgagggtagaactgtctaggggaaggggtgatgtaggtgtgatgttcacacgctgcactcttcacaaggtgctccttgggagatggtgttagggagcttggcaggcattatgttaaatgccttcctccaaaggcygagttaatggacctgtggacagaattcaaaccaattttaatgcatagcagctgtcatttgctacccagtgtttgtgtgaccyggaaggccacttcccaaaacactcagagagtaakttcccctttggtacaatctggattattatttcataagttattgataagcatatgcattagttatctattgctgtgatatagcaatagatatagtgagttgaaacaacaaacatatattgtctcccattttctgtgggtcaagaatccaggcacagcttcactgtgtactttcacagggttccagtaagatgtcatctggggctgcagtctctggaggagggtccacttaggctcactcatgtggctattggcaggatcaagttcctcaagggctgttgcactgaggtcctccrtttctcactggctgttcgctagaagcctccctcagcaccttgctatgagggtctcttcatgactcacacatggtagctggcttccatcagagcaagagagcaagagagtcagaaggcaggtctcaataatctaatctaggagatagtcactagcttcagcccacactcaacaggagggggtcaactaaggatgtgaatcccaggaggcaggatccctcctgccatcctagaagctgcctatcacggtgcatatgtatgttgttgtttgtttttcagagaccaggtcttgctttgtcacccaggctggagtgcagtagtgtcatcatagctcactgccacctcaaattcctgagctcaagcaatcctcccatctcagcctctcgagtagctcggactacaggcacatgccaccacacccagacaattttttttttatttttgtagagacatggttttgccatcttgcccaggctggtcttgagctgctgggctcaagccatcctcccacctcagcctccctaagtaatgggattaatagatgtgagctaccatgcccagcccacagtgtctctggatttttaagttacttagcatgacccactattagtataaaggaactcttgtatgtggctattgagaataaaaatggttcttagtgtaccttttagcttgaatgtatgttttgtgtttgcatattaaattttctctggaatgggatgtgattagatctgcctttcttttcttttttaagactgtgaatgaaagctggaatgccttagcaaccccatcagataagctgtttttctggaattccaaatctacgtatatcaaatcaccaccattctttgaaaacctggtatggctttttattttttaacaaaatgaattctttgaagggtttctttcctaataatatctactttattaccccatgctcttgctttgactacccattttattaaaccctttgcaaacccaagcagatactgccggggaaagttttgggaggctgggatatttggctgccgtgggtctatagtttctctatgcaggggttctgcgtggatgtacacagccaccctagtaatcacctggacttaaacctagtagagtctgagggactgtcccaggagaccatccccagagcccaccatagtgaaccttatacccataaaaaccagggacattgtccctgaaactgatgatctagaagttggtgctctcctgggtgggtcactgtgggaagggatgcagtagaagtgaggattccagttgtccttagcatctgaggagttctagggatgtgaagagagagaatgtcatttgcagctgcgttactgttgcttttgaggggatattgccagtattttaccttttcttcaagagtaagatatgaatgttttgagtaaattcaccttacttttcttggcctctttgataaaaactagaacactagaattttctgtgcattggtgtggaactgtcctctgattcaggtccatgggccaccatcgtagagactgatctggtaacttgtttgggaaaacctgggccaatgctgactttttgtattctttgctagactttggatcttcagccccctaaatctatagtggatgcctatgtgctgctaaatttgggagattcggtaacaactgaccacatctccccagctggaaatattgcaagaaacagtcctgctgctcgctacttaactaacagagggtaagtatgaatgaggcaggaaggactaaaggcaaaaatggaggaatggagttaatgaggccagcatttctcttttcacctggccctttggaatgagactctttggttgtgcactgaggcttaaccctggggtaaaaaccaaytgcattttctgtttgctgcttaacagcttccatgggagaaacgatcaacatgtgaatcctaacaaggggaaggggagagggaccttcatttgagcaagtgtatatattaggcccaactgtcatccctgcccccggcttggctgatctttaaagtacaaggctctgctcttaacctggggcagaggcagaacctgacacgcattgccaggtcctggttgagaaacctaacgtttacagagcactgcttggaggatttgcagcttactcatctgtttatcagttcttcagtagtgtgctgatattcataggtatgccagtattatcaactactgtctcatatattaatcgaggtcagtggttccccaatctgagtttccacgagaatcacgtgaggacataaaaattcctggtttctatccccatctgctgaatcagttctttcagtgattccccagagcgaatttgaggaacagaatccaaatgccttttttctattgattgttgagcccttttgaggcatgaacacgtcagagaattgaatgaaagcaaatctaatgccttcccagaaaaatgcacatacccacaacattttggatagtttcagggattccaagacatactcacctgctcctgtaacccattaaactctctcagtccttaaattctatctaaccattgattaaataatattaacacacccaccccctagtattttaaggaacagctcagtgaactggtcacggtgttaattgtaaggtatgtttcctgacactgcaaagtttcctttcactgaggccccacagacaagatttcctctggtttggggaccagaartagctgttctgcctctttagcactgcctcgatttttctctcatgaaagttgtaagttatgttgccagctgtgtgtctttcctttgcattgagttcctgataattcagggacaaatttgaaactatttctggttactttgtggaacgtattttgtgtttccccctgtttgtggctccatctgatttgcctaccctaattcttccctttgcttccattttctcacttatttttaatttagctctttatcttatatgaagctttataggctaccctactaacaaataaaacattcttttttagayttccttcttatttttctaaccagatttgaaagacagttaacccaggagaatactgacttatgcctctcaccaccccttctcacctctctctcttctccgttgaagctttggggacagcttttctgccatggagaacaatgcttaggagacttagagaaatagccaggtctatgttttgttttgttttgtttttttcttttcttggtgtaagctaaggttaatctttgcttgcttcactaagccagctcctttcttgcttgccttcttagcctaactccacgagaattcaactcctatggctcccgccgaggtaatgacgccgtcatggcacggggaacatttgccaacattcgcttgttaaacagatttttgaacaagcaggcaccacagactatccatctgccttctggggaaatcgtgagtattgtcttctgcttcctgcagacactagcatttgtcagccttggtggaggttggatatttacagttactcgccttttggttttagtttttcttcacagctccatcctaccctaactacagtcctccttgccaggtgtccatatgcatagaatgtatcattgacaaattcaaaccttttcttcttgcttagagattctagaccgtggtttcactgagtctcttttcttaggaattgagctttgagtgacatttcatttaaagtattcgaaggggaaataccasgttaaattaaaggatatttatcaagaagtgctattgtatgactttattggcatgtaatttaattcatctaatccacatgaaaagaaggagtagagaggtgcttggaggcatgttttggttctaatgggagcactgtggtcagtatgttgcagcagggactgtttgttcccagctccacgttatactagctgtggagccttaaagttatttccatctctgagccttgcttttctcacctgtgaagtaaaaatactacttaccttggaagaacgctctgaggcttaaaatgaaatggaatgaaatataaaacctagcatagagtctggtacatgtcataggtccttagtgtcacttcccttcccagtgagtgctgtgaaattgcctgtaaactgtttaacttacttgagaaataaccctgccgacttattttaaaataataatcgctaatatgtctatggcacttaactacattccaggtgttctcctaagctcttggcatatattgatttatgtaatgctcataacaaccccttgaggtaggtaccatgattatctgtgctttaaactgagaagtgaagcataaagaggtcatattactcctttaggtcacacagtggaaaagctgaaattaaaacccagaaagtctggctctgaagtcagtgccctttaccaccacacatactgcctcactcgtaactgattatatttttgtaacacaaactcgttctttagaaataaccagtacctagcccagcagacgcctgttcaatggatagcagaggttacagaatattaaatgtaaaaagatacatgtcgaatgatggaataccttagagaccaaggggaaagacttgtagttatagacattgggggacccctaataaacatcacagtgtaccacacgcatttacaagccctgcatgacatagaacttctagtcagatgtctagaacctcatcttaaatgagacagaatcaaggatgaacagacatttgagtcaagacttgaacagggtgatggggagtgcaaaaagtaaaagaaaaaaattatatacttagagaagagttcattttctgttgctatgaaataacaatcagaagacaagaaagaatgttttaaatttaaaaagaaaattcaaaggagaaggtgattagttgagaacatttcctagaatatgtaacagaaagataagagaaaaaaatgtaagaactgaactcaggaggccctaacaacctgcctaaatagaagtgttaaaaagagaacagaaaaaatgcaagagaggaaattatttcaaaacaaaacaaaaaactacaagcaaaatttctctgagaatccagattgaaaaggcccactgaaggcccatctaaataattttaaaacactccaagttatatcactgtgaaattaagagcaacaaaaggagaaatctcaacatttccagagaaaaacagctcacatgaaacaacaggaaataagacatgttccagacttcttgatgctagaaacttagactgaggaaaatgatttgcatcctaaaatctacacccatcagaccatcagtcaagtgcacttaaagtaatgacacattcagatattcaaaagcttaaaaaagccctcaataccttccttaggaagctacttggcaatgtgttccaccaaaatgagggagtaaatcaaaagggaagacataggatccagatgaagggaatccccaggatgctagtgaaggaagagtcctctgtaacaggaatgcaccaagcccagagagcaagcagtcagcccaagttggaacgggactgagagctccaggaatgatagctccatgacagagattttaaaatggtaaattgcctgatgtgtctgaatatctttaaaggtgatttgtactgtagggtttaattaatgggtaaggacatagaaacaggaaaaacatagaaaaaatgaaaattagtaattttcaaaaaaattcattcaaaacaaatgaaaattactgactccagtgaaacatgtcttaaatcaccaagaaaaggaaatcacagcacattacctggctcagctgtaaatagtatttatgtagtcataatcatgcaaacaccaaatgctgacttaccaaaataactatattgggaggttgggaagaagggagatgtgtggaagaggagagattgttaagagaagtaaatcctcaaagtagaatattgacagataattttaaaaagtggagaaatcaagaactagtagtttaaacataatacctagagatacacaggcacagtaacagaagaaatagctaaatgctatgttctctttagaagagcgtaagagtgcagggagctgttgctttctaagctgtcagtggctctcagcatggcgtgtttaatagaaaagtcaggagacgtgagttctagacctgcttagtccctctgatcttgggtaacatgacgtgctttgccatgagattgtcaactttgcagtactttttaaagcacacactctcacattgttaatacccaaagctacagtctctgaaaatatcagataagttgtttctttctggtctttgaaaggatccagacaattcagttagaagaaggttttcactgtttctatgacagtttctatatttacgagttctgtctagctgaagacatacagaatcctatccgggtttaggtaatgcatgcgaaattaaccacaggttccatcagtacaccaaaatacaaatttgtgaaagtctgtttgagagttttctttagctcctgtctctcttttgaggaattttatcttctgacttacatagcctggaaaaataatggtactgctcaaccaccagagatgatatcatgtctttgtaaagtctcagttcagtgagatattcagattccctgtgagaaacaaatctgtttgtataagatgtttctcatgtactaaaatattaatctttttctaccttttattgggcttccatttgcatttctagcatctcttcccttgacctccatgaagaaaggggactgataaaagtttgcactttatataatttcagaacatgttaccttctttgtgttttgctaattttacaactgacatcaccgagtttctgatattgagccaaaatgtttaggtcacattctgttttttgagttttaaaataatttagtcaatggaaaagaaaaaatctgatctagtttccttttctcccctgatgccttaggattctaatgtttttataaaaccaacaacaattaggcatttctgtcaaaagaatataaaatggtttttaagaatacaaaatttaaggccggatgcagtggcttacgcctgtaatcccagcactttgggaggccgaggtgggaggatcacttgaggtcaggagttcaataccagtttggccaacatggtgaaaccccatctctactaaaaatacaaaaattagctgggtatggtggtgtgcgcctgtaatcccagctacttgggagactggagcaggagaatcaattgaaacccgggaggtggaggttgcagtgagctgagatcgtgccactgcactccagcctagacaatagagtgaaactctatctcaaaaaaaaaaaaaagaatacaaaatttaatttggtagaagtaaaaagatcaagataattgggaatttgtagacaagatgattggacggatttggccatctgcaaacccatccagccccgccctcaccagggctcaggggacctgtgtccattctttgcctctcctgcatctgtaaaacttccttttctcttcctcagcttgatgtgtttgatgctgctgagcggtaccagcaggcaggccttcccctgatcgttctggctggcaaagagtacggtgcaggcagctcccgagactgggcagctaagggccctttcctgctggtgagtatgaagtagacatcctaggaggcagctcccctctgaactgggagggtccccaggcacaaatcctgttgctttactttccaagaagatgtcaaggaagagcaagctcaaaaaagcaggtagtgtttattcctggcctgcttcttggtgcctctggatttattttatttggtgaagggcaatgcagagttgaactggatctatcattcattaatggaccttgggggcatgtctatagaacagttttggggtagggtctgtgaagtctctgaaaacatatccagaagtatacatgtatgtctttcatggggagaggtgtcatggcttttataacattctcagaggctgaggaccccaaatttattcaggtcccttgttccaggtgaatgtcaggaataagccagggccattgtattatctgtcagtttcacagaagagaaaaggagcctggactttttcaggagttactttggcaagaatgggttctaagtctcctggaaaattgggagaatcactttttatawttgcacttcactgcctatgaatatctgcttatgggctctcgatgagagtgaaactcactctgcacatacccaggcagctctttagaaccttccgccatctcggggctctacctcttgaggtgtccccatagaaggggccatgcagggagcagagagcttttgcctcttgagcatttgcttgccctaaaagcagagaagaatcatgccacccagcctgaatcttcagggtggggtacacatggcttacctgatgtcaatttaaatcatttgtggctcgcaaattaatgcacctcggaaacactaagttcatatccacaagtacagtaaaaaaatgtggctgtctggcaggcagttctccagacatttaggcttctgataatgtctttgaacatcacacctattattttaattggttattttgctctgaggaaaatagaaatgttctctgattagttgatagtaggtcaaaggcctgtcttttctggaaactattgaaaagaaccagataattgcagaagaaaaggattttaggaagggggttgggagctgtagccaaaatgcaacccaggcagtcagcactcaggtagggaactctaagatctgatagaggataagaagagaactggcccccaggggttctctagagtccagacttttctatagaaccgcttgagttctggctgcccaggaagccatacagtcttctgttctgtagctgtccaggctgggccacgtagccgtgctggactgtacttacagagagcagtggacagctatgatttacagcttctgaagcaaagcagcatggcctttacacagagctagtgacatgaatagggtgtgtttagaaagctttctacctccctagaatacatccatctatccctaaaaccctagaaaagatctaccgccccaaagaatctgccctctctctgtagcagtgcgtctcaagtttggaaacacttatgggattttttttttttaatactttaatacctgtgtttggatctcatctccagagattctggtttaattggtaaggagaaaggcctggacattgggattttaaaagcctcccctgctgattctggtatgcagcagtggttgagaaccattgcgctatagttcacggttctcaaaattataagaatcactagccccctcccaccccacgctccctgcaagacattctgatgcagcagatctggggtagtacgcaagtatctatgttttcaacaagctcctaaagtgaccctggtgttgggcatcttaaaagtgtgccctagataccaagagacctcttagggtattttaatattatatgacagttattaattattaataataaactaatggggagttctagttaatggagtaccgtcctttattgctgtatattgccaattatagattcccaataaaacatactttaagcttaatatcaagactatattcaacacaatttcatctttgaagcaggaagtgtaaaagcagtacacaagaggtaatcatttactttatctgtggtatgttctgaaagttgcttttttgattgaactttctgtgcctgctgatacacctaaaatagtagaaaaaaatcaagggaaaaattttatgttgttttgtgatgtggattccagatacaatgtaactttgctaaaacatgttatatcatttgtcagacttcatgggtccaattaccagataccagcactgactccctgggtaaagggggacaataagggcatctacatccccgggttagtggatggtggaatgagaggaattatttaagtgcttacatagtgcctctacattatgagcaatcagtgaagactagctattgtgttatttatcactagaggataacattttatgtaaaatattaatatgtacttacaaataatttaggtgtgagaacagttctaacttacaaagtcttttgtttatttttgtttttttaacaatcaccggctcaagaagcttataatttggggtagggcacagaccagtaaatagacaattacaaagcaatataacagaagaaagcacggtgttatgaggcaaaaataaggaccactaactgaaaatttattaagccattttctgtcatcctagatgtattcaagatgtaattcccttagagtacaaagttaatgtaaaaaaaacgcttcattgtgaccttcagtctagaagatgtatggcaaaattaggctgaagcatctttttctcctgtgacattagacatctgatttcactgaaatatagcacacaattactggaaatgagggcctataaaagtccacaaaaccaagtgacttttcaagatataacasaggtaaaaggttactgtcatcactgtctatgaatcatctcattatcgatattctagactttgaagtaaaataataaaaagtttacttaaagcaacagcatcagataattaaacaattctttggtatttaatactaatatttcagaaatagaactccagagtatttccagatgtgcatatgctgatcgatttttaggtttatcatccttcgctttataacggaagtcatttcttatacattgatagaatgtagtatgagtgtagtgatatttttcactctgacattaactaaaaacatggtgtaaatggagaattatagaggtagcaaggcaaaggttacaaaatatatgcaaacatttttgtttatttgtatgctgtatttcattgttgtgtttttattatactttaagttctggggtacatgtgcagaatgtgcaggtatacatgtgccgtggtggtttgctgcacccatcaacccatcatctacattaggtattcctcctaatgctatccctcccctagcccctgacccgccaacaggccccagtgtgtgatgttcccctccctgtgttcatgggttctcattgttcaactcccacttatgggtgagaacatgcagtgtttggttttctgttcttgtgttagtttgctgaggatgatggtttccagcttcatccatgtccctgcaaaggacatgaactcatccttttttatggctgcatagtattccatggtgtatatgtgccacgttttcttaatccagtctatcaatcattgatgggcatttgggttggttccaggtctttgctattgtgaacaatgccacaataaacatacgtgtgcatgcgtctttatagtacaatgatttataatcctttgggtatatacccaggaatgggattgctgggtcaaatggtatttctggttctacatccttaaggaatcgccacaccatcttccacaatggttgaactaatttacactcccaccaacagtgtaaaagcattcctatttctccccatcctctccagcatctgttgttccctgactttttaatgatcgccattctaactggtgtgagatggtatctcattgtggttttgatttgcatttctctaatgaccagtgaggatgagcattttttcatatgtttgttggctgcataaatgtcttttgagaagtgtctgttcatatccttcacccactttttgatggggtgagagagggcatccttctcttgtgccggttttcaaatggaatgcttccagtttttgcccattcagtatgatattgactgtgggtttgtcataatagctcttactattttgagatatgttccatcaatacctggtttattgagagtttttaacatgaagggctgttgaattttgtcaaagtccttttctgcatctattgagataatcatgtggtttttgtctttggttctgtttatgtgatggattacatttattgaattgcatatgttgaaccagccttgcatcccagggatgaagcccacttgatcatggtggataagctttttgatrtgctgctggattcggttttccagtattttattgaggatttttgcatcgatgttcatcagggatattggcctcaaattttttttggttgtgtctctgcccggctttggtatcaggatgatgctggcctcataaaatgagttcgggaggattccctctttttctattgattggaatagtttcagaaggaatggtaccagctcctctttgtacctctggtagaattcggctgtgaatccatctggtcctgggctttttttggttggtaggctattaattactgcctcaatttcagaacttgttattggtctattcagggatttgatttcttcctggtttagtcttgggagggtgtatgtgtccaggaatttatccatttcttctagattttctagtttatttgcgtagaggtgtttatagtattatctgatggtattttgtatttccgggggatcactggtgatattccctttatcattttttattgcctctatttgattcttctctctttccttctttattagtctggctagcagtctgttttgttgatcttttcaaaaaaccagctcctggattcattgatttgattttttgaacagtttctggtgtctctgtctccttcagttctgctttgatcttagttatttcttgccttctgctagcttttgagtttgtttgctcttgcttctctagttcttttaactgtgatgttaggatgtcgattttagaactttcctgctttctcttgtgggcatttagtgctgtaaatttccctctacacactgctttaagtgtgtcccagagattctggtacgttgtgtctttgttctcattggtttcaaagaacatctttatttctgccttcatttcattttttaccagtcattcaggagcaggttgttcagtttccatgtagttgtgtggttttgagtgagtttcttaatcctgagttctaatttgattgcactgtggtctgagagacaggttgttatgatttccattcttttgtgtatgctgaggagtgttttacttccaattatgtggtcagtgttagaaaaagtgcagtgtggtgctgagaagaatgtatattctactgatttggggtagagagttctgtagatgtctattaggtcagctttgtccagaggtgagttcaagtcctggatatccttgttaactttctgtcttgttgatctaatattgacagtggggtgttaaagtctcccactattattgtgtgggagtctaagtctctttgtaggtctctaagaacttgctttatgtattgggtgcatatatatttaggatagttagctcttcttgttgcattgatccctttaccattatgtaatggccttgtctcttttgatctttgttggtttaaagtctgttttatcagagactaggattgcaacccctgctttttttttgctttccatttagttggtaaatcttcctccatccctttattttgagcctatgtgtgtctttgcacctgagatgggtcttctgaatgcagcacactgatgggtcttgactctatccaatttgccagtctgtgtcttttaattggggcatttagcccatttacatttaaggttaatactgttatgtgtgaattggatcctgtcattatgctgttagctggttattttgcccattagttgatgcagtttttcatagcatcgatggtctttacaatttggtatgtttctgcagtgactggtatcggtttttcctttccatgttcattgctttcctcaggagctcttgtaaggcagacctggtggtgacagaatctctcagcatttgcttgtctgtaaaggattttatgtctccttaacatatgaagcttagttcggctggatatgaaattttcggttgaaaattctttaagaatgttgaatattggcccccattctcctctggcttgtagggtgtctgtagagagatccattgttagtctgatgggcttccctttgtgggtaacccgacctttctctctggctgcccttaacatttttttcttttgtttcagccttggtgaatctgacaattatgggtcttgttgagtatctttgtggtgttccatgtatttcctgaatttgaatgttggcctgccttgctaggttggggaagttctcctggataatatcctgaagaatgttttccaacttggtttcattctccctgtcactttcaagtacaccattcaaacgtaatttggtcttttcacatagtctcatgtttcttggaggctttctctgtttcttttcactcttttttctctaatcttttcttattgctttatttcattgagttgatcttcaatctctgatatcttttcttccacttgatcaattcagctattgatacttgtatatactcacgaagttctcgtgctgtgtttttcagctctatcaggtcatttatgttcttctctaaattggttattctagttagcaattcgcctaaccttttttcaaggttcttggcttccttacattgggttaaaacatgctcctttagcttgcaggagtttattaccacccaccttctgaagcctgcttctgtcaatttgtcaatctcattcaccgtctagttttgttcccttgatggtgaggagttgtgatcctttggaggagaagagccattctggttttcggaatgttcagcgtttttgtgctggtttctccccatctttgtggatttatttacctttggtctttgacattggtgaccttcggatggggtctctgagtggatgtccttttggttgatgttgatactattactttgtttgttagttttccttctaacaagcagactcctctgctgcaggtctgctggagtttgctagaggcctacttcagaccctgtttgcctgggtatcaccagcggaagctgcagaacagcaacgattgctgcctcttccttcctctggaagctttgtcccagaggcggacccaccagctgccagccagagctctcctgtatgagatgtcttccagtcaggatacatgggggtcggggacccacttgaggaggcaatctggctttatcagagctcaaatgctgtgctgggaggaccactactctattcagagctgtcaagcagggacatttaagtgtgctgaagctgcacctacagccaccccttcccctaggtgctctgtcccagggagatgggggtgttatctataagtacctgactggggctgctgcctttttttcagagatgccctgcccagagaggaggaatctagagaggcagtaggccttgctgagctgcggtgggctccacccagtttaagactttgtttacactgtgagggtaaaaccacctactcaagcctcagcaatggcygatgcccctctgcccaccaagctcgagcatcccaggtcaacctcagactgctgtgctagcagcaagaatttcaagccagtggatcttagctttctgggctccttgtgggtgggacccaccaagccaggcactggagggaatctcctggtctgctggttgtgaaggccatgggaaaagcgcagtatctgggccagagtgcactgttcctcctggtacagtctctcatggcttcccttggctaggagaggaagtttcctgaccctttgtgcttcccaggtgaggtgacgccccaccccacttgagcgcatcctccatgggctgcacccactgtccaaccagtcccaatgagatgaaccgggtacctcagttggaaatgcagaaatcactcgccttctgtgtcagtctcactgggagctgcagactggagctgttcctattcggccatcatgccagctctctcacaaagtcttttgtaaacctgtgtatccaaagaaaagattggaagtatgtctaaactactgtctttattcatcagggaatcaaagccgtcctggccgagagctacgagcgcattcaccgcagtaacctggttgggatgggtgtgatcccacttgaatatctccctggtgagaatgcagatgccctggggctcacagggcaagaacgatacactatcattattccagaaaacctcaaaccacaaatgaaagtccaggtcaaggtaagctggagcctctctatgccaggccctgtcgaaaggggccccctcgtttgtaaccagtcttgttagaaggaaattagtgaggtttagaaggcaaaaaatatcactcaggaggactgcattagacttaggaggcctactagcatcttttctacctgccttcacagcataggatgatgcctatggatttaatttctctgtttattcacagagttatcctcagttccattcttacctcccaccccctactgtaccctgttcccggtctctcgtgatgagagctcagggatgtgacatttcacattacctaaaacatttcactataaaaacgtgagcaacagatatactcacccctccctaagcctgcccataggcaccaggctttgattagcccaagagtgaaaatgatagatccctaggcaaggtaaagataaagtgcccagcaccaggtcccaggggtcattcggtgccccagacagaggcagtgcaaaagtctgtgtctcagataagcagatgggccagctgcctaagggacaaccttaatgaaatctctgctgattgaatacttctgtccacagggagcccccagaggtttagaaaataccaccctgatgtcattaatagctactgccctgagaagctatttctagttcttagatggctctcacccccatcatttacagtctgcagtgattctcaaactgtaatgggcaaagcagcctcccagrgatcttgctgaaatgcatcttctgatttagtgggtctgggctggggccagcagccttgcatgtcctcatgtgctgctggtgttactgaagtgtggaccacacctgaggggcaggctgggcagaatttcctccgagcagagctgtctcgccacctccctcaatgatgcttctgtttctttgtgccacagctggatactggcaagaccttccaggctgtcatgaggtttgacactgaygtggagctcacttatttcctcaacgggggcatcctcaactacatgatccgcaagatggccaagtaggagacgtgcacttggtgctgcgcccagggaggaagccgcaccaccagccagcgcaggccctggtggagaggcctcccyggctgcctctgggaggggtgctgccttgtagatggagcaagtgagcactgagggtctggtgccaatcctgtaggcacaaaaccagaagtttctacattctctatttttgttaatcatcttctctttttccagaatttggaagctagaatggtgggaatgtcagtagtgccagaaagagagaaccaagcttgtctttaaagttactgatcacaggacgttgctttttcactgtttcctattaatcttcagctgaacacaagcaaaccttctcaggaggtgtctcctaccctcttattgttcctcttamgctctgctcaatgaaaccttcctcttgagggtcattttcctttctgtattaattataccagtgttaagtgacatagataagaactttgcacacttcaaatcagagcagtgattctctcttctctccccttttccttcagagtgaatcatccagactcctcatggataggtcgggtgttaaagttgttttgattatgtaccttttgatagatccacataaaaagaaatgtgaagttttcttttactatcttttcatttatcaagcagagacctttgttgggaggcggtttgggagaacacatttctaatttgaatgaaatgaaatctattttcagtgaaaacttgttgactttgagttttgctgtgtttgtggctagagttttgggatatttagtacagagtgaatctcacaccatatcattgggaagcctgaataaccttcatattctcccatttttacaactctatcagaactgtacgggtataacggaaatgtttaggaaccattatgctcgctcttccctgtttgggagcagacaagaaggaagagtagcctggtggcagtggcaacgatataagtacataaggaaaagcagataaacttcaggacactaaaaaccaattatctgctcatttttacccctgtagtcgtttctgggcatgccttagtttgcttgggttgctataatgtaatgccatagactggctgaaagaacagaaatgtattttctcacagttatggaggctggaattctgagatcaaagttgaagccacttcattttctggtgaggacactcttcctggtttacagatggccaccttcttgcttgttctcacatggcatttctttggtatgtgcctggtgggggagagagaaaataggctctcatgtctcttcttacagcaacactaattgtattggatcagggtcccactcttatggagacccaggaaagctggtggtataacaacttggttcaagtccaaatgcctaagaacctggggaggggcatggggaatgctggtataagtcccagagtctgaatgcccaggaacaagcaggagctgtgatgtccaaggacaggagggcaggatctttgtaatgaatttttaatgtcaaccttagcactcaggggatatggcctggtcatcagaacatctggaatctaatcctctttctacttctcaccagatgagggatcaagacaggttatttagcatccctgcacttgcggtcctggggatcttatttatattcatttaaaaaataaattacaaacaaacagccaggcgcagtggctcatgcctataattccatcactttgggaggccgaggtgggtagatcacctgaggtcaggagttctagaccagcctggccaacatggtgaaaccccgtctctactaaaaatacaaaaaattagccaggtgtggtattgtgtgcctgtaatcccagctacacaggaggctgaggcaggagaattgcttaaacccgggatgcagaggctgcagtgagccgagatcgtgccattgcacgcccgcctgggctacaagagcaaagctccgtctcaaaaaaaaaaaaaaattacaaacaaacagaactccattgtacaaaaaaacctgtgatcctcaagttaagatcagtcctagaataaaaacactaagaatggctgagaaaacagacctccaccctctcagctctccattactgagcagctggggagctgtctcgctccccgcattcagtggctcctgtggtctgtatttttgtatcctccccaaaattcaggtggtgaaaccttaaccccccaggtaatggtaatagaagctggggcctttggaaggtgattagatcatgagggtagtgccttttaaaagagactcaagataagatagagaccccctcatttcttctgccatgggagaacacagcaagaagtcaccatccgtgaaccagaaagtgggttctcaccagatactgaatctgccagtgccttgaacctagactttccagccagaactgtgagaaatttctattgtttataagccacccagttgatatttagttacagcagcccaaccaagactgtggttatgaggaaacaaacacattattgtggctagactaatggaattgggtcccttacctccaagtacaccctctgtccttttcggtaaaaatatcttcgccaggcacggtgtctcatgcctatgatcccaacactttgggaggccgaggctggagggttgcttgagcccagaagtttgagaccagcctgggcaacactctacaaaaaaataaataaataaataaataaataaaataaatcagccaggtgtgcacctgtggtcccagctgttcaggaggctgaggtgggaggatcacttgagcctgggaggtcgtggctatgattgctccactgcactccagcctgggcaatagagtgagaccctatcaatcaatcaccacccccccccccccaaaaaaaaaaagtatcttggccagtgtctcaaccttgcccactaacaagcctaaataaaccaacttcttttacctggttctttaagggctgctcgtcttactatccaaattaaaaatctgctgttctccctcccatattctttgcgaatgaagattcccctgtttgtttggatagttttccaaattcattactgcattcctggcatccgcagcaagctaagagttagttaatatttttaatatagcaaataaggatgagggatgcccttcatgtgtatttacacaccagatttttatggtacatagggagtaatctagggaaaagatatattaggcatgaatcttagctgtggtagaagcacagctcaaattagcttaaggaaaaaaaaaaaaaaagctggctcatagaacttgaggacagtggtggccatgactatgggcttgattggatctagtgactcaagctcccttccatttgcccctccaaccacccccccatccctccaccaatcataccttctgttggcctctgcagtagagtggcctcttctgggcccttccacatgccaggggatatggccaccagcagttctggggaaaccattagtaatttgtgatcgtagagatttgtctcccagtattccctagggcaaaaatattgggagttcctagtcacctaaatgaagaaccttatttttagcagtttccctttcagggctctaacaggactgtggagtaatgtacggggttatgtaggagcaatgcagagccacttttgaaaaacagtagccaaggttctactggctgccttcttaggacattattaaatatcataaacacaagtggaatttaacacccagccagtttgtgttcaaccagacagcgtcattatgaacaaagattatataacgatagctgatattaagtaagttttaaaagttgacatcccaagagtgaagcctacttattcagtacagatttgttgaatgaaattcgtagttttattttacggcataatgaaacagagttccagacatgtacctgccaaatttggttctggttgtcttatcgtatgcaggctggatacctgctactgtgcttctacaggatgttaacagtgtcccctgagtaaaacagttccacggtcagtacatttgggaaccactgagttaaatgggttttatcactgcagaacagacacaagaacaatgtgtgctgtaaatcactgtttgcagggaaggtggcagcaaatggcacagaaacccacctgaccacagactgctttcttctgggcgttcacgcactgtgctccacaggatactcttgagaaacattgagctatggttggtctgttgtttgaaattcaaataataatgaatccattttaaggacaggaattggtttactgaccttgatgttgggatgactcttcatttcagggtgaaaatatcacagcatcagcacaggccaggaccacagagataacaaggtggtagttgtgtaacaggttgtgtctgaaccacaggagcttcaaaacatacacggctggacaccctgccaggatgctctaatggggctgggcatgtgtccatgaaaaagactccccagttgtttctaaaatgtggcctttgttctagaaatgcaatgaccagcatttgggagtcagtcaaaagatccacttcctaaaagcctacctgctcatttctttcattcaatacatattaaccaagtgcctactttgtttgagtccatgcctggcaatgacattattccattaaaagtcaaacaaggaaatgctaagttctccttattttcacttcagtctgcctgcctcagttggctgaatagggctattcaccttcatccaaattgaatcatttacatacttaaaagaacttttcttggccaggcatggtgactcacgcctgtaatcccaacactgtgggaggccgaggcaagtggatcacttgaggtcaggagttcaagaccagcctggccaacatggtgaaaccccgactctactaaaaataaaaaaatttagccgggtgtggtggtgggtgcctgtacccagctatgtgggaggctgaggcaggagaatcacttgaacctagaaggcagaggttgcagtgagccgagatcacaccactacactccaacctgggcaacagagtgagactccatctcagaaaaaaaaataataataataacttttatcttattaaatctatttctagtagatgttttacacatcctattggagttcttaaacaatagtgtattagtctgttttcacactgctataaagaactgcctgagactgggtcatttataaagaaaagaggcttaatagattcacagttccacatggctgaggaggcctcaggaaacttacaatcatggcagaaggggaagcaggcaagtcttacatggcagcagatgagagagagagtgtgtgtaaaggaggaattgtcaaacacttataaaaccatcagatctcatgagaactaactcactatcccaagaacagcatggggacaactgcccccgtgatccaatcacctcccgtcaggtccctcccttgacacatggggattataattcaagatgagatttgggtggggacatatagccaaaccatatcaaatagcaattaaaaaaaatcacataagaaaagacactcttaataaaatacaaatagaaaatgaaaaaaaaccaactcataaacttggtttaaataatccatttgtattgggtcttagtaagaatactactactagtaactattatcaagcaactactgtgtcatgtacttttcacacattcttttaattaaaaactctccactaacccttacagttcagtattatccttgttttacagatgaagaaaagccaaagagaagttatataactggcaagtttctctggctccccgcctgcaccactgctcaccagattgcatgaagagggaggcagctgtaacacctcatcccgttgatctccagggaactcagatacttgtttccacgtccaggaaaccrcaaactaagctctttgaagcatcagcaaaccttgctaagtgacacgtgaatgccatttggatacatattctaatctttcaagtagaaaggacagtcagactgcctcatctgtaacatccaagggatctgagaacagacattcagtccaggtgttgaacatcaacatcattataggaaaatggtcaaagagaacaatggcacacgttaagagaacatattaatagggcaagatgtatagtaaactaagttttcaagaagtattttatcatttttatgctctctactaaaagctgaccactgtagagtggatacacattgctacatacagcaactctacagtggacagcttttagtagtaagcataaaaatggctttatgttctcatgttctctgtgtagccataccacacgttgctacaccaggaacatgagtacatataaccattacatatacatacctgtatgtatgtatattagttacatatacatatgtacagtatatacatgtatatatattgaacccttggaagggatcagcaaagaggaggactcaataaaaaaagactagaatagaactagaagagagagaagcccagggagagcttcaagaagagtgctcaacagggccaaatgcgcagargtcaaatagaaggttaagaagtgcccagtggatttggcaaccagagtcactggtaaccttcaaaagaacaatttcagtagattgttaagggcaaaagccagtttacagtaggttaaggagacaaagggagataaaaattcccaacattccattcattcatctatcccagtgtgtacagagtgattactgtgtgtttgttggcagttgactctaaaaagaaggctagaaatgaggctttttaatttttcccaagtactatgagctctgttggcctacaaaatactcagtgctgtgattcactcatttgtgctttgcatatataatatagtacaaactgctaaaga

SEQ ID NO: 95475 - DNA, 19372 bp, Homo sapiens
atttttagtagagacagggtttcaccttgttggccaggctggtctcaaactcctgatctcaggtgatctgcccatgttggcctcccaacgtgctgggattacaggcatgagccaccacgcccgacctgaaggtagttcttaaagtctagagtgatttccttgtgttagaagaaagattgttaggggagagaactgctgcctgttgaatgtttcccacttgtcagtcctgtgcctgggtgcttgggaacgtgatgttatgggaagaaaaggaagagagagacaagtgatgatattcttacctagcctcactagtaactatgtgactttaggcaggttggttaccttccttgagcttcagtcttgtcacaattaattgggatgaacacacctctatcatcaatatctggggtcacagctccaatgtcccctggggccaggtaggtacataaaggagtgagggaggttaggaggggtctgtggtgtgtgaggaagcacacagccactgctcaaatcctgcatagttgctctatggtggtgtgggcccagtgtggcctgatttgatgaaattttttttttttttgaggcgaagtcttgctctgtagttaccaggctggagtgcagtggcgtgatcttggctcactgcaacctccgccttctgggttcaagctattctcctgcctcagcctcctgagtagctgggactacaggcgggcaccaccatgcccagctaattttttttgtatttagtagagatggggtttcatcatgttggccaggatggtctgtatcgcctaacctcgtgatccgcctgccttggtctcccagagtgctgggattacaggtgtgagccaccacgcccagctgatcttatgatttctttgagagaagtggggagtctgattttatgtgacacccccccactcccattcactaaaatgacagctccatgagggcaagtattttatctgttttattctctggtatggcttgatcccataagcactgaaaagatagttattgaataaatgaaactttccagtacatgttggaagggtttttaaaatgttttgaaactgtgcacaggccaaacccaactttcaggacatgggttttcaacttctggatggtatgatggggtgatagtagggtataaaagtatcctgagaagttgaaagcagtgtgtgaatggggtgttcttttctccccacaatcctttcccatctgctgacagtagacttagcacctcacagatgcttgggcctggaaatgaagccatgaaaatgaagccctcagccttcttggagatcagagccatggtcctcacccacagcacatgggtctctaaacctggacctcaactcgcccatctgtaaaatgagggacttacattaaattcctacagctcctttcagcttgaacattatctgagtctattaggatcatcctatgaggcatcttctctttccctgcccctgataccctagacctgggagatttactcacctggtcccaggggatctatttctcccactctacctgccaggggctgagttctctgcctcacaagcccacattgccaagaagatgagaaacacggctggaaacctccctgtcctggcacccatctcttcctactgccatgaacaccaagacaggttcacaccaaaggtgttctgttcctcatggcaggctctgccacctgattaagagaaacatctaatctcctgctggttccctctcttcttaagaggagaggcctgaggacctgctgaaagctttatctctgcttgtcctccgggtgaggctaatgagtggggccaacgggtggggcagtgtaggcgctttacagcagacacgccttcagacctctgttccctgaagggtggggatgtgggggtcacctctgccagagggagtaggagtggcaagttacctgaccctctagagtctccgtgcctagtcttgtagatggaacccacgttaaaggaaggcatagaaaggagggtcaggccttctcttctccactcatctcaagggaggggatggggaaggagcagagagtagctgaggaaggtagggagaggctaggctgtgtgccggaggagagagatttgtaagccattttggtaaggattttgagcagtttaggagggagcagggccagagactgtcacagagaagagaagagtagggtatttgggggaagaaatggaaatgattccctatggaattagagggtctgtgctactgttcatagaggagatggccaagacagagtctcctgggtcaggagtgggtttgaagggtttccattcttgtttgcaggaacttggggggtcagccaggtgaggagctacctctgttatcaactgggggttgcggctttagggagaggggcatctcgtgtagaagacaagatgctctgtgcctgtggctggtctccggggggacctggacactgttttggaatgccacactgcccccttcccccctagcattctgtggctccatcacttgctcagttgggccggagtggagacacctcattgccctccctggcctgcaggtgaacgtgctggccctcagcatctgcacacgggaagcctaccagtccatgaaggagcggaatgtggacgatgggcacatcattaacatcaataggtgagggcaggtggccaatgggtaccactcacccaccaggctgggtaatgtgctgcagctcacctgacctctttggacctcagtttccttggtgggaaaatacagatttaatacctgaatggcacaattatggtgagggaaagaataatgttgtcaagtaccagcccctggttggctggaatgggcagcttagccccttccctctacagctgaagcctggggcctctcctgggactaagtgcctcgattcctcaggcctggggatgaaccccacctcatggcacaaagagtactatgtacagtgtctgccactggggagccccagtctgaggggggacatggcctctgcctgccttgagatgtcccaatagaaccgtatcagtgaacatacagattagatggagagaattctgacattctgcaccaccaggagagtgcattctgtcgtcagcttagggatgagttccaggaaaaggagggttttccaaagctgtttgaataaccaaaattagattagtgagctgtaggatggccagtagaggtcccctttagaagtcttcccgatgggcatctgggtggtggggctgaccgggtacggcaggagcaccactggtctccctggaacttcattctctcctctttccccttcctctccccacccagcatgtctggccaccgagtgttacccctgtctgtgacccacttctatagtgccaccaagtatgccgtcactgcgctgacagagggactgaggcaagagcttcgggaggcccagacccacatccgagccacggtgaggctgtggcctagccctggtgggcacagggtggcgcaggccctccccacccacacacaccgttcaggaagcccatgttcagaatgtgccgctcagagctcctgggagtggactgggcacagaactgggtgctgctgctccaggcatggccctatgcagcccttcatttcctcatttcactgatccaggagccaacgaccagacttagactttgagctgggagggggctgacctgagggaaagcaagggactgtgggaaaccaggtgcacagtggctggaaaccgggactctgggctcttctcttgaaggccgcatgatcgtgagcgagtcactgaacctccctaagcctcggccttctcacttgtgaaaaggagatgatgagcttttcagggacacttttttgtaaaacgtttacctgacatataggaaaggctctgtagatggtaggtatcattgtggtcactgccagtggcagcttcggagggaggaggccgctgccggatatcaggcagccatcactgtgaagctggggttctgtggcctccatcctctcccctcgacctccccaagacctggcaaagctcagcccctgagaaggccctctctgttggcccagtgcatctctccaggtgtggtggagacacaattcgccttcaaactccacgacaaggaccctgagaaggcagctgccacctatgagcaaatgaaggtggggcctccctctgagcctggtgaagccactgactccctaaatgaaggcagagggaagctcggccttcagactccactcttccagcctttgtggctcctcctggagggttggggtggatgtgtggatgccacagagaagctcagtggtgggagggaatttgagtccattctgtccttgtctcaacccattcccctggtgctctcagtgtctcaaacccgaggatgtggccgaggctgttatctacgtcctcagcacccccgcacacatccaggtgagtctggccctgactgtctactcactggaggaacccaaccagccccagaggaggggagcagggagccctgcagggccaggggagagtgtcacagctgcctcatgccttgtaccttccacagattggagacatccagatgaggcccacggagcaggtgacctagtgactgtgggagctcctccttccctccccacccttcatggcttgcctcctgcctctggattttaggtgttgatttctggatcacgggataccacttcctgtccacaccccgaccaggggctagaaaatttgtttgagatttttatatcatcttgtcaaattgcttcagttgtaaatgtgaaaaatgggctggggaaaggaggtggtgtccctaattgttttacttgttaacttgttcttgtgcccctgggcacttggcctttgtctgctctcagtgtcttccctttgacatgggaaaggagttgtggccaaaatccccatcttcttgcacctcaacgtctgtggctcagggctggggtggcagagggaggccttcaccttatatctgtgttgttatccagggctccagacttcctcctctgcctgccccactgcaccctctcccccttatctatctccttctcggctccccagcccagtcttggcttcttgtcccctcctggggtcatccctccactctgactctgactatggcagcagaacaccagggcctggcccagtggatttcatggtgatcattaaaaaagaaaaatcgcaaccaatctgccttggcttcaggagtgtctttccattctttccccttctctgtgatcaggggtgcttgtgtctcagaatttcttccaggtaggtcccaggtgggtggattgggggcctcactcatgggagtatggattaccttaggtagcaggaatgggtttgtttgggccttgaaaacatgtaggagtttgacaaagcgaagacaggtgtgcaaggctgagaggtctggaagagcatgcagtgctgtgcgaacagctcagaacttaagcacaggagcaaggagccagatggggctgaagaggcagctccttcctgccttcctggatcgctggggggctgagtgctgcgcaagagtctcgccattacctgtgggacgggggcgttagtgagcttgtcagcaggaacacgacaggctcagagtcacttaggaagagaatcagcggcccgggataggaagtgactgttggggtcctgctggctggtgatgggctagtgagaagttctgggaaaaatcaccagcgccgggatgtggggagggaggcaacaagactgaattggttgaccaggaaggccaacccatctccttaaagggcccttcactggtgcgtgggtgaatgcggtccccggcctcctgggacctcgaggaacacaggacgcagccggtagtacggccagctcagctcgccgctcctctagccttgagggaggcgctgtgggggacagcctggcagccacgcatgcgcaaaacaccgtcaggaaggggccggggaggggcgggctcccgaacccggaagcgagggacccacgtgggagcctgggagcgggtggtcgtagctcggtagtccagttgtgggtaatcggggctgtttgttcctgtccgagagagctcggcggagacggctgtcgagtacccttcacctcggtgttgggagcctgggagcgaactgcggcgcgggttaccgctcccggggacgcagcaaggggcatcgagtccctggcgggagctgcgccatggcattgctctcgaccgtccggggcgcgacctggggtcgcctcgtcacccgtcatttctcccatgcagcgcggcatggggagcggcctggtggggaggagctaagccgcttgctgctggatgacctggtgccgacctctcggctggagcttctgtttggcatgaccccgtgtctcctggctctgcaggccgcccgccgctctgtggcccggctcctgctccaggcgggtaaagctgggctgcaggggaagcgggccgagctgctccggatggccgaggcgcgggacattccagttctgcggcccagacggcagaaactggacacaatgtgccgctaccaggtccaccagggtgtctgcatggaggtgagcccgctgcggccccggccttggagagaggccggggaggcgagcccaggcgacgacccccagcagttgtggctcgtcctcgatgggatccaggatccccggaattttggggctgtgctgcgttccgcacacttcctcggagtggataaggtcatcaccagccggagaaacaggcacggacgtccctcattctctatgtgccccaacttggagacgcagccgagttcctaagcaccttggcccttgggtgatcccttagccagacttacctgtcccagaactctcatccccctagcccttgggagccctgggagggtagggagccgggcttgagatggcccagcctaatgcggggaacggggaaaccttgcagctgcccgctcactccagtagtcagcaagtccagcgcgggggctatggaggtgatggacgtgttctccactgatgacctcaccggatttttacaggtaatgaggggcaagaggggaaggaacagatgtgagcccagctcagcctcttcaaggggacgaagctagcccctggcgagggagagaaaggggcatgttggcaccgcttcctttggccttctaaatccctctggggatggaagggtcctggagtttttaaaacggcaaatggagcattagctgaattcttcctagcgttataccctttcctgcaccccttccccaggtatgcaccactttgcctcttctgtaagtcagcctcagtgtctayttgcctactaggtcgggcttcagtaaatgcattttgttcagctgtggggagctgcgtacaggagacctgagttcctcgaatagggcacagcttgaaaggatgtttgaacaagaagatctttatgccattagtatctagcaagagacaaaccttggaaacccctctcccatccgtttgtcttcagctgtgcttcccttgctggacacaaggaggcagtattgctctgcatatggaatcccctctgaccataccccccccaacccccaccccaactgcagggtgagaaatttccctcttaagaagggggagagctctgggacctgtctagaacaacgctgtccaataaaaatatggtgtgagaaacataggtagttttagcttttctagtagccacattgaaaagtaaagagatgacattttaaataaattgtgtccagtatatccaaaataatatcaatttaacatgtaatcattttaattattattaatattattaattttttgagagagtttcrttcttattgcccaagctggagtgcagtggtgcaatattggctcactgcaacctctgcctcctgggttcaagtgattctcctgcttcagccttccaagtaactgggattataggcacacaccatgcccagctaattttttttttttgtatttagatggggtttcactatgttggtccggctgttcttgaactcgtgaccttaagcgatccactcgcctcggcctcccaaagtgctgggattakaggcatgagccaccgcacctggcctttaaaaaatattattaatgaaatattttacattcctttaaaaaatgttttacatacaacacacctcgatttgaattagccacctttcaattgcttaatagccacatgtagctagtggctactatattgaacagcacatatctagaagcattttttggcttcacttttttgtagagagcccctttctccaagcctgataggagatgagkttcccactcatcacttccagcccctgaacaggtagcttctgaaaacacagaaacactgcagaacatccacttaagctccaggcatcacatctccctactgtcatcagcatctgacctggagagtgtcatccgcctgttgctgtggaagagctgraggtgccccaagcaggggcctgtgctggggccccatcccttcctgcgtactcagagacactgctgtagcaattttcctcctcttcctgcagcatccacttttctcttacactctcttcagcatgcaagcaaacattcccctctcacgctcttgatctcacaccagtcagctcttcctctcacactgaatcaaaggcttcatcaaggtcaccagtggcctccatgttgctgcattccagggtctgttctcaattcttttctgacttgacccatctgcagcagctggcacagttgaccactccttcctccttgaaacactatacctgctttccttctgcttcaccatgtcctctctgagagacatttttagtggttcttcctcaaccccctgacttccgagcattagcatttcccagattttagtcctcggatctcttttgttgttgttgttaagagatggggtcagctgggcacaatggctcacgcatgtaatcccagcactttgggaggctgaggcaggcagatcatgaggtcaggagatcaagaccatcctggctaacayggtgaaacaccatctctactaaaaatacaaaaaattagctgggtgtggtggttcgtgcctgtagtcccagctactcgggaggcggaggtaggagaatcgcttgaacccgggaggtggaggtggtagtgagccgagattgtgccactgcactccagcctgagtgacagagtgacgtgtcaaaaaaaaaaaagagatgaggtcttggccgggagcggttgttaagagatggggtcttggccaggcacggtggctcacgcctataatcctagaactttgggaggctgaggcaggtggatcacctgaggtcaggagttcgagaccaacctggccaaaatggtgaaaccctgtctctactaaaaatacaaaaattacctgggcatggtggcgggcacttgtaatcccagctgctcgggaggctgaggcagaagagttgcttgaatccaggaggcggaggttgcagtgagccgagatcacagcgttgcactccagcctgggcaataagagtgaaactctatctcaaaaaaaaaaaaaagagagagagagagagagagagatggggtcttgctgtgttgcccagcctggagtccagtggcacaatcacagctcagtatagcctccgaattcctgggctcaagccatcctcccacctcagcctcctgagtagttggagatacaggtgcacaccatctcacctaatttttttctttcttttttctttttctttttttttttgtagagatgaggtctcactttgttgcccaggctggtctcaaactcctggcttcaagaagtcctcctgccttagcctcccaaaatgctgggattacaggcgtgagccacctcacctggtcctggatctcttttctgtatatgttcatttcttgttggtctcatctagtctcatggctttaaatactatctgaattcaaattcccgcccaagtgtatactccagcctggaccttggttctgaattccagattcactcatctagttgcctactgcacagttgttgttattgttgttgttgttttgctgtcaggcgggcatttcaaacctaacatttctaaaactgagcgcttgttccttctggagcaactccatccctttggttgtttaggtcaaaaaccttggcatcatccttaactaaagttatttccgtattatcaccatttctgcctgtttccactgctaccactctggcccaagcaagtcaccatcatctgttgaccgttattgcagaaacttcccacctggcctcctttcttctgctcttggctctcagcacagcaggcagagtgattctgttgaagtcataccatgttacttctctgctcaaaacctttcaaagcctctgtaccgctcagattcaaaggcagagtccttccagtagccctggagaccatacctcatgtggctcttgttccttcttctgtcttgacgcctctcttcccactggccaccttactgttctcaaacatgccagggaggcacctgcctctgtgcttgctgatctctctgcctagaatgttcttgccccagatgtctgcacggtgctcctccttctccttcaggtctgcactcaaatgtcacctcagtgagtccatccccacctgcccttccacaaggctgggattttggtctgttttgttttgttcagtgccctgtcctcagtgcctagaacagagcccatgctaggtgcttaataactattgactaattgactggatcagcagataaatgaatgtatgggcaaggctgggctcttccttggccagggctctgatggataattttttttttttttttttgagatgggggtctcactctgtcacccaagcaggagtgcagtggcgcaatcttagctcgctgcaatgtctgcctcctggtctcaagagatcctcgtgtctcctgagtagctgggattacaggctgatttttgtatttttagtagagacagagtttcaccatgatgctcaggctagtcttttttttttttttgagacagagtggagtctcgctttgttgcccaggctggaggcagtggtgtgctctcagctcactgcaacctccgcctcccgggttcaagcgattctcctccctcagactcccaaatagctgggactacaggcatgtgccaccacacccagctaattttttgtgtgtttttagtagagacggagtttcaccatgttagccagggtggtctcaaactcctgacctcaggtgatccgcccgcctcggcctcccaaagtgctgggattacaggcgtgagctactgmgcctggttttttktttttttttttaatttgagatggagtttcactcttgctgcccaggctggagtacaatggcgcaatctcggttgactgcagcctctgcctcccgagttcaagcgattctcctgcctcagcctcctgagtagctgggattacaggcatgcaccaccatgcccggctaattttgtatttttagtagagacggggtttctccatgttgttcagactggtctcgaactcccaacctcaggtgatccccctgccttggcctcccaaagtgctggggattacaggcgtgagccaccgtgcctgggccaggctagttttgaactcctgacctcaggtaatctgcctgcttcagcctcccaaagtgctggaattacaggcttgagccactgcatacagcctctgatgaagatttgatgaattagaataggagaggcaggcatggtggctgacgcttgtaatcctagcactctgggaggccaaggtgggaggatcgcttgaagccaggagttccagaccaaccagggcaacatggcaaaacctcatctcaaaaaaaaaaaatgcaaaaactagccgggtggggtggcgagtgcctgtagtcccagctacttgggaggctgaggtgggaggatcaccagaacccaggcggttgaggctgcggtgagctgtgatcgtgccactgcactccagcctgagcgagagtaagaccctatctcaaaattaaaataaaaaaagaattagaacatatcttcttccccctttcagaccaaagcccagcagggctggctcgtggccggcacggtgggctgcccaagcacagaggatccccagtcctccgagatccccatcatgagttgcttggagttcctctgggaacggcctactctccttgtgctgggtaggtggatgtccctgcgtttgtgcccagattacatttccygagcaactgrgtgtccagctgggcaaccctaaccctcagccccacgccctgcagggaatgagggctcaggtctatcccaggaggtgcaggcctcctgccagcttctcctcaccatcctgccccggcgccagctgcctcctggacttgagtccttgaacgtctctgtggctgcaggtgagtctactcccctttccctttcctctatccctctaatcacgcaggtgggatttgatgccctctaatcccatttgctggctgtttgtgtgcctcagttgctttatgtacaaaatggggaaattacatcccgttgatgagatgaggggctgcctgaatgtctaggtctctaaacatcatccttctcctccgtcctctcttcccttgtccttgtgtctgtgcaggaattcttcttcactccatttgcagccagaggaagggtttccccacagagggggagagaaggcagcttctccaagacccccaagaaccctcagccaggtctgaagggctcagcatggctcagcacccagggctgtcttcaggcccagagaaagagaggcaaaatgagggctgacgtggactgtccacagtgttcatgtgctggagtcagggacggccgcacctgcctccgccggctccagtgtgcggggagcctctgcctgagtgtgcaccaggcccatgtttattgaccacagtctgrgggggggggaaggggactgcggtggacaccagaggaagctgtttcctgttgtgatgttggacctgtagtaggacatggtgatttgttaatttccatgggaagccatgatggcctagcatggagggaatctgttcccaggccctgcctggaagttgagggaaagtttagacatctgcagagaggcaggcagcccagcccaggkgacccgttcctcttgaaccagtcattgcctgtggcaaatgtgtgtatgagaatgtggggggtggagggcggggccctgatgtggagtagacagtgcgcacctcaggcccacacacggccccgccctggggccttgagcgcaggcctcatctttctgtgccgcgggactcygcacctacctcacagggttgttgtgaggctcaaataaaacatcactcagcacgtgggagattctggccaattcctccgttaggtggcagcctcgctcttcggtccagtcttcaggcagcttccacagcctccttgcggggagactcctggctgcagccccatgagaggcgacgggaaattagcaaacacctcccaccccacgggggccccccacgggtgactgagtcagttcccctcaaggggaggaactgggagcaggcttgccgttgattgtacaaccgagacagatttggcactcctcccctcgggtcccaggaaagcagcaggagccagcagtgtgaggagcatagaagtgtttctgtcctggtggcacattggaaccacctggcatgctttaaaaaacccaacactgacaccagagagtctgacatgatgggtgtggcgccacctggcatccggctttcgaaagcgccaccattggtctaatgtgcagccaaggctgagaatcaccactagggcaggtggactcaaattccacacccttgacattttgggccagataattttttgttgtgagagccatcctgtgcactgtaggatgtttagcagaatccccgacctatacgcactagatgcctgtagcatgacctctcattatgaaaccagaaatgtctccagacgttgccagatggcttctaagagacaaaaatctcccctcctggagcatggctttggaggatagcaaccccgaacttgcaatcctgactgctatgtgaccttgggggggcgctccttacccacctgggcctcggtgccctcctgggcgaaaggggaataatcctaccttcctggattgttgggagaatatggagggcaataggaactcacatgtattaggtgctcaataaatagtactccacttttctctggaatccatctgcattggatttgtctcaattctaataatggcaatgccaatttagagcaacacttaaagttgtttaaaaagggcctatgctcctttttttttgagacagggtctcactctgtcgctcaggctggagtgcagtggcgcgatcttggctcactgcatcctctgcctcccaggttcaagtgattctcctgcctcagccttccaagtggctgggactacaggcgtgcaccacgcgcagctaatttttatattttttttttggtagagatggggtttcactgtgttggccaagctggtctcaaactcctggcctcaggtgatctgcccgcctcagcctcccaaagtgctggcattacaggtgtgaacctggcctaaaaagggcctaagatctttttttttttttttgagacggagtctcgctctgttgcccaggctggagtgcagtggcgcgatctcggctcactgaaagctctgccttccgagttcatgccattctcttgcctcagcctcccgagtagctgggactacaggcgcccgccaccaagcctggctaattttttgtatttttcatagagacggggtttcaccgtgttagccaggatggtctcgatctcctgacctcgtgattcacctgcctcggcctcccaatgtgctgggattacaggcgtgagccactgcgccyggcctaagatctttttaaagtcaaagttactcctctcaagaaagaggacagaattccttcataaactgcactgatcagcttctgccccccttgagctccctgtccctgactgccacgcaggctctgacccatccctgcttcattcttggccaagtgcctagtgtagtgatgtttcactttggcttgtcattggggtcaaggaggagaatatttttaatatttcagaagcccagaggcacctgactgattaaatcagaatctctggagaaggagccatgtgttggtttttattttttctttttttgagacggagtcttgctctgttgcccagactggagtgcagtggcacaatcccagctcactgcaacctctggctcctgggttcaagcggttctcctgcctcagcctcccaagtagctgggattacaggtatgtgccaccacacccagctaagttttgtatttttagtagagatggggtttctccatgttggccaggctggtctcaaattccctgacctcaggtgatctgcccgccttggcctcccacagtgctrggattacaggcgtgcactaccatgcccagccgatatttcttaaagctactagttgatctcattgtgtgaccaggttcaagaatcagtggcctttgagccactcactcatgtccaagaaactgcttcccatgcacacctgtgcttttgagctcatgcctgaaagtttaggtgagggtgagctttcatctgtccctcaggttccggaaggtgctcattccagtcctggctccatggctttccacttagatggcttctcagcctcctcatcttggggatagtaccattactaccagccctatctacccccttccttttcaacagaagttataaaaataaaatgagagtatcggtaaaagatgttctgtaaaccagaggacactgcaccccaggactagcgcacaataatacagactttgatgtggtggttaattttgtgtatcaacttgactgggccatgggttgcccagatgtttggtcaaacattctgggtgtttctctgaggctgtttttggaagagattaacgtttacattggtagactgagtcaagcagacccctaatgtgagtgggtctcatccattcagttgagggcctgaatagaacaaaaagtctgacctctcccaagtcagagaatccttcctaccttcagactagacctgaaatatcagctcttcctggatctcaagcgtgctggcctttgaatggaaatgataccattggttttcctggtgctcaggccttcaaactcaggctggaatgaaaccatcggctctcctgggcgtccagcttgctgactcaccctgcacatcttgagacttgcccgcctccatcattgcatgagccaatgccttataatctcttgaacacacgcacagttggttctgtttctctggagaaacctaatgcagttgatgaaaatgaatgtaggcgtcccagtgctccctgcatatgggatgcagggttcagcttgctctctagaaccaaggccaacatggaacttagaagttggagtaggggctacttaggcaccccaccccccacagactcctccatggtggctggaacccgatctaacctgccctgggcatgctgttcatcagctttccctgtcccagtggtctgggccatctagaagactctcctgggcttagtcaggtacagggggcttctccctgcttcactccctgggcagcaggctggctggcctctgggaagacaggttcacttaaaccaaaggggattgaggcttaaattacaggccatacacacacaggtgtgtgctaatttctggtatacaggcagtcccccaacaaagaggaagggtctgaggtcctaaggatgaggaggatgaggcctgattctcctttaggcagcctctggtacctggcgcggtgcctatacactgagtggacactgctcagcaagtgtgggttaagtacacgggagctggggaggctgtggctgtgggtgtgaaggggctgggtgggggtccatcccctgcagggcaaagttggaatgaagtcagaggagagagcagtggtggttaagagcaggagcctggctgctagacagtgcttgctttgagttccaactctgtggcttgctagaagtataaatgtggacatgtcccttaaattccaagcctcagttttcatcgcctataaaatggggatgacagtggtgtccacttcaaaggatggtggtatggattgaaagaggtcatacatgtaaaaccctcagccccatgcctggaggagcatggtagctgctcctcaaagcctctagggccagatttagaggtcagggtgctgggttgtgcttcccaaccaacctggcctccgttttcctgtaggctctggcccctttcatctgcagtgcacaatgatttaccactgggaactgctggagggagttgagggaggagaggggttggaatgacatttgtaggatccccctttgtcagggctccaagatcctgagatgccgagatggaaagggtctaagaagaattggcagtgacttggtattctcggagcagctaaatcaaggctggcaccccagatccctgctgcaggcctggaatatttttttggcaggaggctaaattgtcaatccccctccccctaggttggggtcctgaattagacagcacacctcgccacccccgctttgccgacacacatacacacacaccaccactaccaccaccgactcctgcagggccaggtgccagggatccccacagtttgtaaatgtaatcaaccttgaggtttctcacttccacaggtgcaattagcatgcccatctgctaatccctgattaatggtgtttacaaacatggggctccactgcagagccgctcagccactccctcctggggttktgaggcaggggtcttccctgcaacctctccccacttcttcaggcctcctccccagccagaacccctctgcctccccttccccaggcagtgaacagagctagaggtccctcctcctccttccccgagcttcctggccccttctcagtgtacacatgtggaagcggagagcagggaaagcagacagggaggcttggcggcaaggccaggatcctactcatccctgtcccaccgactcagtctaccagtgtctttcttcccaattctgaacttcaaggatgtgtactgggcgcgctgcctttattcaccactcagctgcagccctgaggccacacaaacatgtccccctgcaggagttctcggtgggtcagaagtccggtaccaaaagcaggatgtcagacagtgccggctccacatgtgggccctaccttaggcaagtcacttaccctgattgagcctcagtttcttaatctgcaaaatggagataagaatactacctaccatgtaggcttaaggtttgtatgtgaggattaatgatgggatacatgaaaaagacttagcacagtgcccgggacacagtaggtgttcaataaatgtgagcttttcaatgcgatgatgacgatgacaatgatgacgatgatgatgaaaagaggcttttgaagctaaaaaaaaatgcccaagaacgcctcctcctcccctcaccctgctctctggggggaagggcaagtcccagctcattactggtgggggctgcgtagggggaggtgtcagattggaatcactcctgggtctgtttgcagcttccctgtttcattaacacctccctagtggtcttcagctcatcctgctgggggaggtgctccagaaagttctaacggcctcctacccagcccagagctcagtgcctctcacttctgggcctgtgcgccaggtgacatagaggcagttttatgytggccgctgaccagaggttgtcactgtccccctctcctgagggtcctggaaacctggtcaggggacgaagcacctggagcggatccttccttttatcctcttccctcaacctctaatccataggttttaatcccccatctcctgggcaccccaacatggccactttcccttccttcagaatccccctgtgaacagggcgcagtctcaggttcccatcccacccatctcttgctagctggatgcccaaggcaagatgcttgtcctctaggacatttagttgtctcttctgtaaaatgaggatgtcatacctcacagggggttagcacagtgcccagtaaattgtaaactctcaataattgtagttattttatgggcaaataaaatatttatttgctcaaatattgtagttattttatgggcaaaacaactgctctcaaaactatgttcttaaatcgcagaactgtatgtagcccattgggggtgggtggaaggggagcagggccagagccctgaggaccattagcacctccagagaagctggaaagggc
